(19) United States
(12) Patent Application Publication
(10) Pub. No.: US 2011/0314575 A1
(43) Pub. Date: Dec. 22, 2011

(54) Plasmodium Vaccines, Antigens, Compositions and Methods

(75) Inventors: Vidadi Yusibov, Havertown, PA (US); Vadim Mett, Newark, DE (US); Konstantin Musiychuk, Wilmington, DE (US); Christine E. Farrance, Oxford, PA (US)

(73) Assignee: FRAUNHOFER USA, INC., Plymouth, MI (US)

(21) Appl. No.: 13/121,251

(22) PCT Filed: Sep. 28, 2009
(86) PCT No.: PCT/US09/58669

§ 371 Date: Aug. 31, 2011

Related U.S. Application Data
(60) Provisional application No. 61/100,744, filed on Sep. 28, 2008.

(51) Int. Cl. A01H 5/00; C12N 15/62; C12N 15/63; C12N 5/10; A61P 37/04; C12P 21/00; C12P 21/02; C07K 14/445; A61P 33/02; C12N 9/96; A61K 39/015

(52) U.S. Cl. 800/298; 435/188; 536/23.2; 435/320.1; 435/419; 424/192.1; 435/69.3; 530/350

(57) ABSTRACT

The present invention relates to the intersection of the fields of immunology and protein engineering, and particularly to antigens and vaccines useful in prevention of infection by Plasmodium parasites. Provided are recombinant protein antigens, compositions, and methods for the production of such antigens in plants. In some embodiments, Plasmodium antigens include Pfs25 polypeptides, Pfs28 polypeptides, Pfs48/45 polypeptides, Pfs230 polypeptides, and/or combinations thereof.

### CROSS REFERENCE TO RELATED APPLICATIONS

[0001] This application claims the benefit of U.S. Provisional Application No. 61/100,744, filed Sep. 28, 2008, the entire disclosure of which is hereby incorporated by reference in its entirety.

### BACKGROUND OF THE INVENTION

[0002] Malaria is a vector-borne infectious disease caused by protozoan parasites of the genus Plasmodium. It is widespread in tropical and subtropical regions, including parts of the Americas, Asia, and Africa. Each year, there are approximately 515 million cases of malaria, killing between one and three million people, the majority of whom are young children in Sub-Saharan Africa (Snow et al., 2005, Nature, 434:214-7; incorporated herein by reference). Malaria is commonly associated with poverty, but is also a cause of poverty and a major hindrance to economic development.

[0003] Plasmodium parasites are transmitted by female Anopheles mosquitoes. Symptoms include one or more of light headedness, shortness of breath, tachycardia, fever, chills, nausea, flu-like illness, coma, and death. No vaccine is currently available for malaria. Existing preventative therapies must be taken continuously to reduce the risk of infection, but these prophylactic treatments are often too expensive for most people living in endemic areas. Malaria infections are often treated through the use of antimalarial drugs, such as quinine or artemisinin derivatives, although drug resistance is increasingly common.

### SUMMARY OF THE INVENTION

[0004] The present disclosure provides compositions and methods of making compositions that induce or enhance an immune response against Plasmodium sexual-stage antigens, for example, Pfs25, Pfs28, Pfs48/45, Pfs230, HAP2, GCS1 homologues, and gametocyte surface antigens. Such compositions are useful for the reduction of transmission of Plasmodium infections. The compositions can include an isolated fusion protein comprising a thermostable protein and a Plasmodium polypeptide, wherein the Plasmodium polypeptide can be a Pfs25, Pfs28, Pfs48/45, or Pfs230 polypeptide or immunogenic portion thereof, and wherein the fusion protein, when administered to a subject, induces or enhances an immune response against the Plasmodium polypeptide. In some embodiments, the thermostable protein can be a lichenase polypeptide. The lichenase polypeptide can be a modified lichenase B polypeptide. The modified lichenase B polypeptide can be a polypeptide having the amino acid sequence of SEQ ID NO: 40 or a modified lichenase B polypeptide having at least 90%, at least 95%, at least 98% sequence identity SEQ ID NO: 40.

[0005] In some embodiments, the Plasmodium polypeptide can be a Pfs25 polypeptide. The Pfs25 polypeptide can have the amino acid sequence of SEQ ID NO: 42 or can have at least 95%, at least 98%, at least 99% sequence identity to SEQ ID NO: 42. In some embodiments, the Plasmodium polypeptide can be a Pfs28 polypeptide. The Pfs28 polypeptide can have the amino acid sequence of SEQ ID NO: 55 or can have at least 95%, at least 98%, at least 99% sequence identity to SEQ ID NO: 55. In some embodiments, the Plasmodium polypeptide can be a Pfs48/45 polypeptide. The Pfs48/45 polypeptide can have the amino acid sequence of SEQ ID NO: 62 or can have at least 95%, at least 98%, at least 99% sequence identity to SEQ ID NO: 62. In some embodiments, the Plasmodium polypeptide can be a Pfs230 polypeptide. The Pfs230 polypeptide can have the amino acid sequence of SEQ ID NO: 95 or can have at least 95%, at least 98%, at least 99% sequence identity to SEQ ID NO: 95.

[0006] In some embodiments, the fusion protein can have an amino acid sequence selected from the group consisting of SEQ ID NOs: 152, 154, 156, 158, 160, 162, 164, 166, 168, 170, 172, 174, 176, 178, 180, 182, 184, 186, 188, 190, 192, 194, 196, 198, 200, 202, 204, 206, 208, 210, 212, 214, 216, 218, 220, 224, 226, 228, 230, 232, 234, 236, 238, 240, 242, 244, 246, 248, 250, 252, and 254, or can be a polypeptide having sequence identity of at least 90%, at least 95%, at least 99% to an amino acid sequence selected from the group consisting of SEQ ID NOs: 152, 154, 156, 158, 160, 162, 164, 166, 168, 170, 172, 174, 176, 178, 180, 182, 184, 186, 188, 190, 192, 194, 196, 198, 200, 202, 204, 206, 208, 210, 212, 214, 216, 218, 220, 224, 226, 228, 230, 232, 234, 236, 238, 240, 242, 244, 246, 248, 250, 252, and 254.

[0007] Also disclosed are nucleic acids comprising the sequences encoding the fusion proteins. Such a nucleic acid can encode the amino acid sequence of a polypeptide selected from the group consisting of SEQ ID NOs: 152, 154, 156, 158, 160, 162, 164, 166, 168, 170, 172, 174, 176, 178, 180, 182, 184, 186, 188, 190, 192, 194, 196, 198, 200, 202, 204, 206, 208, 210, 212, 214, 216, 218, 220, 224, 226, 228, 230, 232, 234, 236, 238, 240, 242, 244, 246, 248, 250, 252, and 254, or a polypeptide having sequence identity of at least 90%, at least 95%, at least 99% to an amino acid sequence selected from the group consisting of SEQ ID NOs: 152, 154, 156, 158, 160, 162, 164, 166, 168, 170, 172, 174, 176, 178, 180, 182, 184, 186, 188, 190, 192, 194, 196, 198, 200, 202, 204, 206, 208, 210, 212, 214, 216, 218, 220, 224, 226, 228, 230, 232, 234, 236, 238, 240, 242, 244, 246, 248, 250, 252, and 254. Also disclosed are expression vectors comprising the nucleic acids. The expression vectors can further comprising a leader sequence. The expression vector can be an Agrobacterial plasmid, a plant viral vector or a plant viral vector cloned into an Agrobacterial plasmid. Also disclosed are host cells comprising the expression vectors. The host cell can be a plant cell and may comprise a plant. Also disclosed are methods of producing the fusion proteins and Plasmodium Pfs25, Pfs28, Pfs48/45, or Pfs230 polypeptides, the method comprising: providing a nucleic acid construct comprising a nucleic acid encoding the fusion protein; introducing the nucleic acid construct into a plant cell; and maintaining the cell under conditions permitting expression of the fusion protein.

[0008] Also disclosed are methods of methods of making compositions that induce or enhance an immune response against Plasmodium sexual-stage antigens, for example, Pfs25, Pfs28, Pfs48/45, Pfs230, HAP2, GCS1 homologues, and gametocyte surface antigens, in plants. These include methods of making a composition that induces or enhances an immune response against a Plasmodium Pfs25, Pfs28, Pfs48/45, or Pfs230 polypeptide. In one embodiment, the method comprises producing the fusion protein as described above in a plant; isolating the fusion protein; and combining the isolated fusion protein with a pharmaceutically acceptable carrier. In one embodiment, the method comprises: producing the Plasmodium polypeptide Pfs25, Pfs28, Pfs48/45, or Pfs230 in a plant; isolating the polypeptide; and combining the polypeptide with a pharmaceutically acceptable carrier. The Plasmodium polypeptide can be a Pfs25 polypeptide; the Pfs25 polypeptide can have the amino acid sequence of SEQ ID NO: 42 or can be polypeptide having at least 90% sequence identity to SEQ ID NO: 42. The Plasmodium polypeptide can be a PFs28 polypeptide; the Pfs28 polypeptide can have the amino acid sequence of SEQ ID NO: 55 or can be polypeptide having at least 90% sequence identity to SEQ ID NO: 55. The Plasmodium polypeptide can be a Pfs48/45 polypeptide; the Pfs48/45 polypeptide can have the amino acid sequence of SEQ ID NO: 62 or can be polypeptide having at least 90% sequence identity to SEQ ID NO: 62. The Plasmodium polypeptide can be a Pfs230 polypeptide; the Pfs230 polypeptide can have the amino acid sequence of SEQ ID NO: 95 or can be polypeptide having at least 90% sequence identity to SEQ ID NO: 95. The plant can transiently express the polypeptide or fusion protein; the transient expression can be from an Agrobacterial plasmid, a plant viral vector, or a plant viral vector cloned into an Agrobacterial plasmid In some embodiments, the plant can be transgenic for the polypeptide or fusion protein. The plant may be from a genus selected from the group consisting of Brassica, Nicotiana, Petunia, Lycopersicon, Solanum, Capsium, Daucus, Apium, Lactuca, Sinapis or Arabidopsis, for example Nicotiana benthamiana, Brassica carinata, Brassica juncea, Brassica napus, Brassica nigra, Brassica oleraceae, Brassica tournifortii, Sinapis alba and Raphanus sativus. Plants that may be used include alfalfa, radish, mustard, mung bean, broccoli, watercress, soybean, wheat, sunflower, cabbage, clover, petunia, tomato, potato, tobacco, spinach, and lentil. In some embodiments the plant can be a sprouted seedling. Also provided are plant cells produced by the foregoing methods and plant containing such a plant cells.

[0009] In some embodiments, plant-produced Plasmodium polypeptides are purified from plant materials. In some embodiments, plant-produced Plasmodium polypeptides are not purified from plant materials.

[0010] Also disclosed are pharmaceutical compositions comprising the fusion proteins. of any one of claims 1 to 32 and a pharmaceutically acceptable carrier or excipient. Such compositions can further include an adjuvant. The adjuvant can be selected from the group consisting of alum, Quil A, QS21, aluminum hydroxide, aluminum phosphate, mineral oil, MF59, Malp2, incomplete Freund's adjuvant, complete Freund's adjuvant, alhydrogel, 3 De-O-acylated monophosphoryl lipid A (3D-MPL), lipid A, Bortadella pertussis, Mycobacterium tuberculosis, Merck Adjuvant 65, squalene, virosomes, SBAS2, SBAS1, AS03 and unmethylated CpG sequences.

[0011] Also provided are a methods of inducing or enhancing an immune response against an Plasmodium polypeptide in a subject, the method comprising administering a therapeutically effective amount of a Plasmodium polypeptide or composition thereof prepared according to the foregoing methods. The peptide or composition thereof may be administered orally, intranasally, subcutaneously, intravenously, intraperitoneally, or intramuscularly. Also provided are a methods of inducing or enhancing an immune response against a Plasmodium polypeptide in a subject, by feeding a plant, or an edible portion thereof, or plant cell produced by the above-described to a subject. In these methods, the subject may be an animal, such as a human, a non-human primate, a bird, or a rodent.

[0012] Also disclosed are methods of reducing transmission of Plasmodium infection. In one embodiment, the method comprises reducing transmission of Plasmodium to a subject in a population at risk for Plasmodium infection, comprising administering to one or more subjects in the population an effective amount of a Plasmodium polypeptide or composition thereof prepared according to the foregoing methods. In one embodiment, the method comprises method of reducing transmission of Plasmodium from a subject, the method comprising administering to the subject an effective amount of a Plasmodium polypeptide or composition thereof prepared according to the foregoing methods. In these methods, the subject may be an animal, such as a human, a non-human primate, a bird, or a rodent.

### Definitions

[0013] Amino acid: As used herein, term “amino acid,” in its broadest sense, refers to any compound and/or substance that can be incorporated into a polypeptide chain. In some embodiments, an amino acid has the general structure H₂N—C(H)(R)—COOH. In some embodiments, an amino acid is a naturally-occurring amino acid. In some embodiments, an amino acid is a synthetic amino acid; in some embodiments, an amino acid is a D-amino acid; in some embodiments, an amino acid is an L-amino acid. “Standard amino acid” refers to any of the twenty standard L-amino acids commonly found in naturally occurring peptides. “Nonstandard amino acid” refers to any amino acid, other than the standard amino acids, regardless of whether it is prepared synthetically or obtained from a natural source. As used herein, “synthetic amino acid” encompasses chemically modified amino acids, including but not limited to salts, amino acid derivatives (such as amides), and/or substitutions. Amino acids, including carboxy- and/or amino-terminal amino acids in peptides, can be modified by methylation, amidation, acetylation, and/or substitution with other chemical groups that can change the peptide's circulating half-life without adversely affecting their activity. Amino acids may participate in a disulfide bond. The term “amino acid” is used interchangeably with “amino acid residue,” and may refer to a free amino acid and/or to an amino acid residue of a peptide. It will be apparent from the context in which the term is used whether it refers to a free amino acid or a residue of a peptide.

[0014] Animal: As used herein, the term “animal” refers to any member of the animal kingdom. In some embodiments, “animal” refers to humans, at any stage of development. In some embodiments, “animal” refers to non-human animals, at any stage of development. In certain embodiments, the non-human animal is a mammal (e.g., a rodent, a mouse, a rat, a rabbit, a monkey, a dog, a cat, a sheep, cattle, a primate, and/or a pig). In some embodiments, animals include, but are not limited to, mammals, birds, reptiles, amphibians, fish, insects, and/or worms. In some embodiments, an animal may be a transgenic animal, genetically-engineered animal, and/or a clone.

[0015] Antibody: As used herein, the term “antibody” refers to any immunoglobulin, whether natural or wholly or partially synthetically produced. All derivatives thereof which maintain specific binding ability are also included in the term. The term also covers any protein having a binding domain which is homologous or largely homologous to an immunoglobulin binding domain. Such proteins may be derived from natural sources, or partly or wholly synthetically produced. An antibody may be monoclonal or polyclonal. An antibody may be a member of any immunoglobulin class, including any of the human classes: IgG, IgM, IgA, IgD, and IgE. As used herein, the terms “antibody fragment” or “characteristic portion of an antibody” are used interchangeably and refer to any derivative of an antibody which is less than full-length. In general, an antibody fragment retains at least a significant portion of the full-length antibody's specific binding ability. Examples of antibody fragments include, but are not limited to, Fab, Fab', F(ab′)2, scFv, Fv, dsFv diabody, and Fd fragments. An antibody fragment may be produced by any means. For example, an antibody fragment may be enzymatically or chemically produced by fragmentation of an intact antibody and/or it may be recombinantly produced from a gene encoding the partial antibody sequence. Alternatively or additionally, an antibody fragment may be wholly or partially synthetically produced. An antibody fragment may optionally comprise a single chain antibody fragment. Alternatively or additionally, an antibody fragment may comprise multiple chains which are linked together, for example, by disulfide linkages. An antibody fragment may optionally comprise a multimolecular complex. A functional antibody fragment typically comprises at least about 50 amino acids and more typically comprises at least about 200 amino acids.

[0016] Approximately: As used herein, the term “approximately” or “about,” as applied to one or more values of interest, refers to a value that is similar to a stated reference value. In certain embodiments, the term “approximately” or “about” refers to a range of values that fall within 25%, 20%, 19%, 18%, 17%, 16%, 15%, 14%, 13%, 12%, 11%, 10%, 9%, 8%, 7%, 6%, 5%, 4%, 3%, 2%, 1%, or less in either direction (greater than or less than) of the stated reference value unless otherwise stated or otherwise evident from the context (except where such number would exceed 100% of a possible value).

[0017] Characteristic portion: As used herein, the phrase a “characteristic portion” of a protein or polypeptide is one that contains a continuous stretch of amino acids, or a collection of continuous stretches of amino acids, that together are characteristic of a protein or polypeptide. Each such continuous stretch generally will contain at least two amino acids. Furthermore, those of ordinary skill in the art will appreciate that typically at least 5, at least 10, at least 15, at least 20 or more amino acids are required to be characteristic of a protein. In general, a characteristic portion is one that, in addition to the sequence identity specified above, shares at least one functional characteristic with the relevant intact protein.

[0018] Characteristic sequence: A “characteristic sequence” is a sequence that is found in all members of a family of polypeptides or nucleic acids, and therefore can be used by those of ordinary skill in the art to define members of the family.

[0019] Combination therapy: The term “combination therapy,” as used herein, refers to those situations in which two or more different pharmaceutical agents are administered in overlapping regimens so that the subject is simultaneously exposed to both agents.

[0020] Dosing regimen: A “dosing regimen,” as used herein, refers to a set of unit doses (typically more than one) that are administered individually separated by periods of time. The recommended set of doses (i.e., amounts, timing, route of administration, etc.) for a particular pharmaceutical agent constitutes its dosing regimen.

[0021] Expression: As used herein, “expression” of a nucleic acid sequence refers to one or more of the following events: (1) production of an RNA template from a DNA sequence (e.g., by transcription); (2) processing of an RNA transcript (e.g., by splicing, editing, and/or 3′ end formation); (3) translation of an RNA into a polypeptide or protein; (4) post-translational modification of a polypeptide or protein.

[0022] Gene: As used herein, the term “gene” has its meaning as understood in the art. It will be appreciated by those of ordinary skill in the art that the term “gene” may include gene regulatory sequences (e.g., promoters, enhancers, etc.) and/or intron sequences. It will further be appreciated that definitions of gene include references to nucleic acids that do not encode proteins but rather encode functional RNA molecules such as tRNAs. For the purpose of clarity we note that, as used in the present application, the term “gene” generally refers to a portion of a nucleic acid that encodes a protein; the term may optionally encompass regulatory sequences, as will be clear from context to those of ordinary skill in the art. This definition is not intended to exclude application of the term “gene” to non-protein-coding expression units but rather to clarify that, in most cases, the term as used in this document refers to a protein-coding nucleic acid.

[0023] Gene product: As used herein, the term “gene product” or “expression product” generally refers to an RNA transcribed from the gene (pre-and/or post-processing) or a polypeptide (pre- and/or post-modification) encoded by an RNA transcribed from the gene.

[0024] Homology: As used herein, the term “homology” refers to the overall relatedness between polymeric molecules, e.g. between nucleic acid molecules (e.g. DNA molecules and/or RNA molecules) and/or between polypeptide molecules. In some embodiments, polymeric molecules are considered to be “homologous” to one another if their sequences are at least 25%, at least 30%, at least 35%, at least 40%, at least 45%, at least 50%, at least 55%, at least 60%, at least 65%, at least 70%, at least 75%, at least 80%, at least 85%, at least 90%, at least 95%, or at least 99% identical. In some embodiments, polymeric molecules are considered to be “homologous” to one another if their sequences are at least 25%, at least 30%, at least 35%, at least 40%, at least 45%, at least 50%, at least 55%, at least 60%, at least 65%, at least 70%, at least 75%, at least 80%, at least 85%, at least 90%, at least 95%, or at least 99% similar.

[0025] Identity: As used herein, the term “identity” refers to the overall relatedness between polymeric molecules, e.g. between nucleic acid molecules (e.g. DNA molecules and/or RNA molecules) and/or between polypeptide molecules. Calculation of the percent identity of two nucleic acid sequences, for example, can be performed by aligning the two sequences for optimal comparison purposes (e.g., gaps can be introduced in one or both of a first and a second nucleic acid sequences for optimal alignment and non-identical sequences can be disregarded for comparison purposes). In certain embodiments, the length of a sequence aligned for comparison purposes is at least 30%, at least 40%, at least 50%, at least 60%, at least 70%, at least 80%, at least 90%, at least 95%, or 100% of the length of the reference sequence. The nucleotides at corresponding nucleotide positions are then compared. When a position in the first sequence is occupied by the same nucleotide as the corresponding position in the second sequence, then the molecules are identical at that position. The percent identity between the two sequences is a function of the number of identical positions shared by the sequences, taking into account the number of gaps, and the length of each gap, which needs to be introduced for optimal alignment of the two sequences. The comparison of sequences and determination of percent identity between two sequences can be accomplished using a mathematical algorithm. For example, the percent identity between two nucleotide sequences can be determined using the algorithm of Meyers and Miller (CABIOS, 1989, 4: 11-17), which has been incorporated into the ALIGN program (version 2.0) using a PAM120 weight residue table, a gap length penalty of 12 and a gap penalty of 4. The percent identity between two nucleotide sequences can, alternatively, be determined using the GAP program in the GCG software package using an NWSgapdna.CMP matrix. As used herein, the term “overall identity” refers to identity over a long stretch of sequence. In some embodiments, overall identity refers to identity over at least 50, 60, 70, 80, 90, 100, 150, 200, 250, 300, 400, 500, or more amino acids and/or nucleotides. In some embodiments, overall identity refers to identity over the complete length of a given sequence.

[0026] Isolated: As used herein, the term “isolated” refers to a substance and/or entity that has been (1) separated from at least some of the components with which it was associated when initially produced (whether in nature and/or in an experimental setting), and/or (2) produced, prepared, and/or manufactured by the hand of man. Isolated substances and/or entities may be separated from at least about 10%, about 20%, about 30%, about 40%, about 50%, about 60%, about 70%, about 80%, about 90%, about 95%, about 98%, about 99%, or 100% of the other components with which they were initially associated. In some embodiments, isolated agents are more than about 80%, about 85%, about 90%, about 91%, about 92%, about 93%, about 94%, about 95%, about 96%, about 97%, about 98%, about 99%, substantially 100%, or 100% pure. As used herein, a substance is “pure” if it is substantially free of other components. As used herein, the term “isolated cell” refers to a cell not contained in a multi-cellular organism.

[0027] Lichenase polypeptide: As used herein, the term “lichenase polypeptide” refers to a polypeptide showing at least 50% overall sequence identity with one or more lichenase polypeptides listed in Table 1. In some embodiments, a lichenase polypeptide shows at least 60%, at least 70%, at least 80%, at least 85%, at least 95%, at least 96%, at least 97%, at least 98%, at least 99%, or 100% identity with a listed lichenase polypeptide. In some embodiments, a lichenase polypeptide further shares at least one characteristic sequence element with the listed lichenase polypeptides.

[0028] Nucleic acid: As used herein, the term “nucleic acid,” in its broadest sense, refers to any compound and/or substance that is or can be incorporated into an oligonucleotide chain. In some embodiments, a nucleic acid is a compound and/or substance that is or can be incorporated into an oligonucleotide chain via a phosphodiester linkage. In some embodiments, “nucleic acid” refers to individual nucleic acid residues (e.g. nucleotides and/or nucleosides). In some embodiments, “nucleic acid” refers to an oligonucleotide chain comprising individual nucleic acid residues. As used herein, the terms “oligonucleotide” and “polynucleotide” can be used interchangeably. In some embodiments, “nucleic acid” encompasses RNA as well as single and/or double-stranded DNA and/or cDNA. Furthermore, the terms “nucleic acid,” “DNA,” “RNA,” and/or similar terms include nucleic acid analogs, i.e. analogs having other than a phosphodiester backbone. For example, the so-called “peptide nucleic acids,” which are known in the art and have peptide bonds instead of phosphodiester bonds in the backbone, are considered within the scope of the present invention. The term “nucleotide sequence encoding an amino acid sequence” includes all nucleotide sequences that are degenerate versions of each other and/or encode the same amino acid sequence. Nucleotide sequences that encode proteins and/or RNA may include introns. Nucleic acids can be purified from natural sources, produced using recombinant expression systems and optionally purified, chemically synthesized, etc. Where appropriate, e.g., in the case of chemically synthesized molecules, nucleic acids can comprise nucleoside analogs such as analogs having chemically modified bases or sugars, backbone modifications, etc. A nucleic acid sequence is presented in the 5′ to 3′ direction unless otherwise indicated. The term “nucleic acid segment” is used herein to refer to a nucleic acid sequence that is a portion of a longer nucleic acid sequence. In many embodiments, a nucleic acid segment comprises at least 3, at least 4, at least 5, at least 6, at least 7, at least 8, at least 9, at least 10, or more than 10 residues. In some embodiments, a nucleic acid is or comprises natural nucleosides (e.g. adenosine, thymidine, guanosine, cytidine, uridine, deoxyadenosine, deoxythymidine, deoxyguanosine, and deoxycytidine); nucleoside analogs (e.g., 2-aminoadenosine, 2-thiothymidine, inosine, pyrrolo-pyrimidine, 3-methyl adenosine, 5-methylcytidine, C-5 propynyl-cytidine, C-5 propynyl-uridine, 2-aminoadenosine, C5-bromouridine, C5-fluorouridine, C5-iodouridine, C5-propynyl-uridine, C5-propynyl-cytidine, C5-methylcytidine, 2-aminoadenosine, 7-deazaadenosine, 7-deazaguanosine, 8-oxoadenosine, 8-oxoguanosine, 0(6)-methylguanine, and 2-thiocytidine); chemically modified bases; biologically modified bases (e.g., methylated bases); intercalated bases; modified sugars (e.g., 2′-fluororibose, ribose, 2′-deoxyribose, arabinose, and hexose); and/or modified phosphate groups (e.g., phosphorothioates and 5′-N-phosphoramidite linkages). In some embodiments, the present invention may be specifically directed to “unmodified nucleic acids,” meaning nucleic acids (e.g. polynucleotides and residues, including nucleotides and/or nucleosides) that have not been chemically modified in order to facilitate or achieve delivery.

[0029] Operably linked: As used herein, the term “operably linked” refers to a relationship between two nucleic acid sequences wherein the expression of one of the nucleic acid sequences is controlled by, regulated by, modulated by, etc., the other nucleic acid sequence. For example, the transcription of a nucleic acid sequence is directed by an operably linked promoter sequence; post-transcriptional processing of a nucleic acid is directed by an operably linked processing sequence; the translation of a nucleic acid sequence is directed by an operably linked translational regulatory sequence; the transport or localization of a nucleic acid or polypeptide is directed by an operably linked transport or localization sequence; and the post-translational processing of a polypeptide is directed by an operably linked processing sequence. A nucleic acid sequence that is operably linked to a second nucleic acid sequence may be covalently linked, either directly or indirectly, to such a sequence, although any effective three-dimensional association is acceptable.

[0030] Pfs25 polypeptide: As used herein, the term “Pfs25 polypeptide” refers to a polypeptide showing at least 50% overall sequence identity with one or more Pfs25 polypeptides listed in FIG. 1. In some embodiments, a Pfs25polypeptide shows at least 60%, at least 70%, at least 80%, at least 85%, at least 95%, at least 96%, at least 97%, at least 98%, at least 99%, or 100% identity with a listed Pfs25polypeptide. In some embodiments, a Pfs25 polypeptide further shares at least one characteristic sequence element with the listed Pfs25 polypeptides. The amino acid sequence encoding a representative Pfs25 polypeptide is shown in FIG. 24 (SEQ ID No: 41; Genbank number AAF63684.1) Other representative forms of Pfs25 have an amino acid sequence that has 1, 2, 3, 4, 5, 10 or more amino acid changes compared to the amino acid sequence of Genbank number AAF63684.1). Other amino acid sequences that have been identified for Pfs25 include for example, without limitation, AAD55785.1; AAD39544.1.

[0031] Pfs28 polypeptide: As used herein, the term “Pfs28 polypeptide” refers to a polypeptide showing at least 50% overall sequence identity with one or more Pfs28 polypeptides listed in FIG. 1. In some embodiments, a Pfs28 polypeptide shows at least 60%, at least 70%, at least 80%, at least 85%, at least 95%, at least 96%, at least 97%, at least 98%, at least 99%, or 100% identity with a listed Pfs28 polypeptide. In some embodiments, a Pfs28 polypeptide further shares at least one characteristic sequence element with the listed Pfs28 polypeptides. The amino acid sequence encoding a representative Pfs28 polypeptide is shown in FIG. 24 (SEQ ID No: 55; Genbank number AAT00624.1) Other representative forms of Pfs25 have an amino acid sequence that has 1, 2, 3, 4, 5, 10 or more amino acid changes compared to the amino acid sequence of Genbank number AAT00624.1).

[0032] Pfs48/45 polypeptide: As used herein, the term “Pfs48/45 polypeptide” refers to a polypeptide showing at least 50% overall sequence identity with one or more Pfs48/45 polypeptides listed in FIG. 1. In some embodiments, a Pfs48/45 polypeptide shows at least 60%, at least 70%, at least 80%, at least 85%, at least 95%, at least 96%, at least 97%, at least 98%, at least 99%, or 100% identity with a listed Pfs48/45 polypeptide. In some embodiments, a Pfs48/45 polypeptide further shares at least one characteristic sequence element with the listed Pfs48/45 polypeptides. The amino acid sequence encoding a representative Pfs48/45 polypeptide is shown in FIG. 24 (SEQ ID No: 62; Genbank number PF13_{—}0247) Other representative forms of Pfs48/45 have an amino acid sequence that has 1, 2, 3, 4, 5, 10 or more amino acid changes compared to the amino acid sequence of Genbank number PF13_{—}0247).

[0033] Pfs230 polypeptide: As used herein, the term “Pfs230 polypeptide” refers to a polypeptide showing at least 50% overall sequence identity with one or more Pfs230 polypeptides listed in FIG. 1. In some embodiments, a Pfs230 polypeptide shows at least 60%, at least 70%, at least 80%, at least 85%, at least 95%, at least 96%, at least 97%, at least 98%, at least 99%, or 100% identity with a listed Pfs230 polypeptide. In some embodiments, a Pfs230 polypeptide further shares at least one characteristic sequence element with the listed Pfs230 polypeptides. The amino acid sequence encoding a representative Pfs230 polypeptide is shown in FIG. 24 (SEQ ID No: 95; Genbank number AAA29724) Other representative forms of Pfs230 have an amino acid sequence that has 1, 2, 3, 4, 5, 10 or more amino acid changes compared to the amino acid sequence of Genbank number AAA29724).

[0034] Pharmaceutical agent: As used herein, the phrase “pharmaceutical agent” refers to any agent that, when administered to a subject, has a therapeutic effect and/or elicits a desired biological and/or pharmacological effect.

[0035] Pharmaceutically acceptable carrier or excipient: As used herein, the term “pharmaceutically acceptable carrier or excipient” means a non-toxic, inert solid, semi-solid or liquid filler, diluent, encapsulating material or formulation auxiliary of any type.

[0036] Plasmodium polypeptide: As used herein, the term “Plasmodium polypeptide” or “Plasmodium antigen polypeptide” refers to a polypeptide showing at least 50% overall sequence identity with one or more Pfs25, Pfs28, Pfs48/45, and/or Pfs230 polypeptides listed in FIG. 1. In some embodiments, a Plasmodium polypeptide shows at least 60%, at least 70%, at least 80%, at least 85%, at least 95%, at least 96%, at least 97%, at least 98%, at least 99%, or 100% identity with a listed Pfs25, Pfs28, Pfs48/45, and/or Pfs230 polypeptide. In some embodiments, a Plasmodium polypeptide further shares at least one characteristic sequence element with the listed Pfs25, Pfs28, Pfs48/45, and/or Pfs230 polypeptides. In some embodiments, a Plasmodium polypeptide is not a Pfs25, Pfs28, Pfs48/45, and/or Pfs230 polypeptide, but instead, is a different polypeptide naturally produced by one or more species of the Plasmodium genus.

[0037] Portion: As used herein, the phrase a “portion” or “fragment” of a substance, in the broadest sense, is one that shares some degree of sequence and/or structural identity and/or at least one functional characteristic with the relevant intact substance. For example, a “portion” of a protein or polypeptide is one that contains a continuous stretch of amino acids, or a collection of continuous stretches of amino acids, that together are characteristic of a protein or polypeptide. In some embodiments, each such continuous stretch generally will contain at least 2, at least 5, at least 10, at least 15, at least 20 or more amino acids. In general, a portion is one that, in addition to the sequence identity specified above, shares at least one functional characteristic with the relevant intact protein. In some embodiments, the portion may be biologically active.

[0038] Protein: As used herein, the term “protein” refers to a polypeptide (i.e., a string of at least two amino acids linked to one another by peptide bonds). Proteins may include moieties other than amino acids (e.g., may be glycoproteins, proteoglycans, etc.) and/or may be otherwise processed or modified. Those of ordinary skill in the art will appreciate that a “protein” can be a complete polypeptide chain as produced by a cell (with or without a signal sequence), or can be a characteristic portion thereof. Those of ordinary skill will appreciate that a protein can sometimes include more than one polypeptide chain, for example linked by one or more disulfide bonds or associated by other means. Polypeptides may contain L-amino acids, D-amino acids, or both and may contain any of a variety of amino acid modifications or analogs known in the art. Useful modifications include, e.g., terminal acetylation, amidation, etc. In some embodiments, proteins may comprise natural amino acids, non-natural amino acids, synthetic amino acids, and combinations thereof. The term “peptide” is generally used to refer to a polypeptide having a length of less than about 100 amino acids.

[0039] Similarity: As used herein, the term “similarity” refers to the overall relatedness between polymeric molecules, e.g. between nucleic acid molecules (e.g. DNA molecules and/or RNA molecules) and/or between polypeptide molecules. Calculation of percent similarity of polymeric molecules to one another can be performed in the same manner as a calculation of percent identity, except that calculation of percent similarity takes into account conservative substitutions as is understood in the art.

[0040] Subject: As used herein, the term “subject” or “patient” refers to any organism to which compositions in accordance with the invention may be administered, e.g., for experimental, diagnostic, prophylactic, and/or therapeutic purposes. Typical subjects include animals (e g., mammals such as mice, rats, rabbits, non-human primates, and humans; insects; worms; etc.).

[0041] Substantially: As used herein, the term “substantially” refers to the qualitative condition of exhibiting total or near-total extent or degree of a characteristic or property of interest. One of ordinary skill in the biological arts will understand that biological and chemical phenomena rarely, if ever, go to completion and/or proceed to completeness or achieve or avoid an absolute result. The term “substantially” is therefore used herein to capture the potential lack of completeness inherent in many biological and chemical phenomena.

[0042] Suffering from: An individual who is “suffering from” a disease, disorder, and/or condition has been diagnosed with or displays one or more symptoms of the disease, disorder, and/or condition.

[0043] Susceptible to: An individual who is “susceptible to” a disease, disorder, and/or condition has not been diagnosed with the disease, disorder, and/or condition. In some embodiments, an individual who is susceptible to a disease, disorder, and/or condition may not exhibit symptoms of the disease, disorder, and/or condition. In some embodiments, an individual who is susceptible to a disease, disorder, and/or condition will develop the disease, disorder, and/or condition. In some embodiments, an individual who is susceptible to a disease, disorder, and/or condition will not develop the disease, disorder, and/or condition. In some embodiments, an individual who is susceptible to a disease, disorder, and/or condition is an individual having higher risk (typically based on genetic predisposition, environmental factors, personal history, or combinations thereof) of developing a particular disease or disorder, or symptoms thereof, than is observed in the general population.

[0044] Therapeutically effective amount: The term “therapeutically effective amount” of a pharmaceutical agent or combination of agents is intended to refer to an amount of agent(s) which confers a therapeutic effect on the treated subject, at a reasonable benefit/risk ratio applicable to any medical treatment. In some embodiments, a therapeutically effective amount is an amount that is sufficient, when administered to a subject suffering from or susceptible to a disease, disorder, and/or condition, to treat, diagnose, prevent, and/or delay the onset of the symptom(s) of the disease, disorder, and/or condition. The therapeutic effect may be objective (i.e., measurable by some test or marker) or subjective (i.e., subject gives an indication of or feels an effect). A therapeutically effective amount is commonly administered in a dosing regimen that may comprise multiple unit doses. For any particular pharmaceutical agent, a therapeutically effective amount (and/or an appropriate unit dose within an effective dosing regimen) may vary, for example, depending on route of administration, on combination with other pharmaceutical agents. Also, the specific therapeutically effective amount (and/or unit dose) for any particular subject may depend upon a variety of factors including the disorder being treated and the severity of the disorder; the activity of the specific pharmaceutical agent employed; the specific composition employed; the age, body weight, general health, sex and diet of the subject; the time of administration, route of administration, and/or rate of excretion or metabolism of the specific pharmaceutical agent employed; the duration of the treatment; and like factors as is well known in the medical arts.

[0045] Therapeutic agent: As used herein, the phrase “therapeutic agent” refers to any agent that, when administered to a subject, has a therapeutic effect and/or elicits a desired biological and/or pharmacological effect.

[0046] Treatment: As used herein, the term “treatment” (also “treat” or “treating”) refers to any administration of a biologically active agent that partially or completely alleviates, ameliorates, relives, inhibits, delays onset of, prevents, reduces severity of and/or reduces incidence of one or more symptoms or features of a particular disease, disorder, and/or condition. Such treatment may be of a subject who does not exhibit signs of the relevant disease, disorder and/or condition and/or of a subject who exhibits only early signs of the disease, disorder, and/or condition. Alternatively or additionally, such treatment may be of a subject who exhibits one or more established signs of the relevant disease, disorder and/or condition.

[0047] Unit dose: The term “unit dose,” as used herein, refers to a discrete administration of a pharmaceutical agent, typically in the context of a dosing regimen.

[0048] Vector: As used herein, “vector” refers to a nucleic acid molecule which can transport another nucleic acid to which it has been linked. In some embodiments, vectors can achieve extra-chromosomal replication and/or expression of nucleic acids to which they are linked in a host cell such as a eukaryotic and/or prokaryotic cell. Vectors capable of directing the expression of operatively linked genes are referred to herein as “expression vectors.”

### BRIEF DESCRIPTION OF THE DRAWINGS

[0049] FIG. 1. Exemplary Pfs25, Pfs28, Pfs48/45, and Pfs230 sequences from Plasmodium species. Amino acids in bold indicate the location of a signal peptide. Amino acids that are underlined indicate the presence of lichenase, 6xHis tags, and KDEL sequences. Amino acids in plain font indicate Pfs25, Pfs28, Pfs48/45, and Pfs230 sequences. Amino acids that are bold and underlined indicate transmembrane domains and/or gpi anchors in native proteins.

[0050] FIGS. 2-12. Expression, characterization and purification of peptide fusions to AlMVCP

[0051] FIG. 13 is a graphical representation of the Binary Launch Vector: pGR-D4

[0052] FIG. 14 is a graphical representation of the modified lichenase gene used to generate the constructs

[0053] FIG. 15 shows examples of protein production for selected malaria antigens.

[0054] FIG. 16. Engineering, expression and solubility profiles of Pfs25 and Pfs28 targets.

[0055] FIG. 17 is a table summarizing the results of IFA, SIFA and SMFA assays for Pfs25 constructs.

[0056] FIG. 18 table summarizing the results of IFA, SIFA and SMFA assays for Pfs28 constructs.

[0057] FIG. 19. Engineering, expression and solubility profiles of Pfs48 targets.

[0058] FIG. 20 is a table summarizing the results of IFA, SIFA and SMFA assays for Pfs48/45 constructs.

[0059] FIG. 21. Engineering, expression and solubility profiles of Pfs230 targets.

[0060] FIG. 22 is a table summarizing the results of IFA, SIFA and SMFA assays for Pfs230 constructs.

[0061] FIG. 23A depicts the results of an isotype analysis of the IgG response elicited by Pfs230A in the presence of Alhydrogel. FIG. 23B depicts the results of an isotype analysis of the IgG response elicited by Pfs230A in the presence of Quil A adjuvant.

[0062] FIG. 24 provides exemplary Pfs25, Pfs28, Pfs48/45, and Pfs230 fusion protein sequences from Plasmodium l species.

[0063] FIG. 25 provides exemplary Pfs25, Pfs28, Pfs48/45, and Pfs230 fusion protein constructs from Plasmodium species.

### DETAILED DESCRIPTION Of CERTAIN EMBODIMENTS OF THE INVENTION

### Plasmodium and Plasmodium Therapies

[0064] Malaria, a common infectious diseases and enormous public health problem, is caused by protozoan parasites of the genus Plasmodium. Four Plasmodium species can infect humans: Plasmodium falciparum, Plasmodium vivax, Plasmodium ovale, and Plasmodium malariae. The most serious forms of the disease are caused by Plasmodium falciparum and Plasmodium vivax. As used herein, the term “malaria parasite” is used to refer to one, two, three, or four of these Plasmodium species.

[0065] Malaria parasites are transmitted by female Anopheles mosquitoes. Malaria parasites multiply within red blood cells, causing symptoms that include symptoms of anemia (e.g., light headedness, shortness of breath, tachycardia, etc.), as well as other general symptoms such as fever, chills, nausea, flu-like illness, and in severe cases, coma and death. Malaria transmission can be reduced by preventing mosquito bites with mosquito nets and insect repellents, or by mosquito control measures such as spraying insecticides inside houses and draining standing water where mosquitoes lay their eggs.

[0066] No vaccine is currently available for malaria. Existing preventative therapies must be taken continuously to reduce the risk of infection. These prophylactic treatments are often too expensive for most people living in endemic areas. Malaria infections are treated through the use of antimalarial drugs, such as quinine or artemisinin derivatives, although drug resistance is increasingly common.

[0067] Provided herein are materials and methods for inducing or enhancing an immune response against antigens expressed at the sexual stage of the Plasmodium life cycle. More specifically, polypeptides and methods of making such polypeptides are provided. Immunity against the sexual stages of the parasite offers an effective way to reduce or stop malaria transmission. A transmission blocking vaccine (TBV) specifically targeting the sexual development of the parasite in the mosquito vector may elicit the production of antibodies which can effectively block transmission of the parasite from invertebrate mosquito vector to vertebrate host. Transmission of malaria depends upon the presence of infectious male and female gametocytes in the peripheral blood of infected persons and successful ingestion of these gametocytes by Anopheles mosquitoes. Soon after ingestion, exflagellation occurs within the mosquito midgut, and emergent male gametes fertilize female gametes, resulting in the formation of zygotes. The zygotes undergo post-fertilization transformation into motile ookinetes which traverse the midgut epithelium and develop into oocysts resulting in the production of infective sporozoites Finally, the sporozoites are released into the hemocoel, invade the salivary glands and are transmitted to vertebrate hosts during subsequent blood feeding.

[0068] The targets of transmission blocking antibodies can include pre-fertilization antigens (Pfs230 and Pfs48/45) expressed in the circulating gametocytes and post-fertilization antigens (Pfs25 and Pfs28) expressed during mosquito stage ookinete development. Unlike Pfs25 and Pfs28, pre-fertilization antigens are also targets of the natural immune response and thus immunity induced by a vaccine based on any of these antigens will have the added benefit of natural boosting of immunity. Because transmission blocking antibodies target antigens expressed by the parasite in the mosquito vector, they are expected to be effective in reducing transmission of parasites to the next host. Transmission blocking antibodies are useful for reducing transmission of Plasmodium in a population, e.g., a group of one, two, three, four, five or more subjects. The subjects can reside in the same limited geographical area, for example, a household or a community.

### Plasmodium Antigens

[0069] In general, Plasmodium antigens can include any immunogenic polypeptide that elicits an immune response against Plasmodium parasites. According to the present invention, immunogenic polypeptides of interest can be provided as independent polypeptides, as fusion proteins, as modified polypeptides (e.g., containing additional pendant groups such as carbohydrate groups, methyl groups, alkyl groups [such as methyl groups, ethyl groups, etc.], phosphate groups, lipid groups, amide groups, formyl groups, biotinyl groups, heme groups, hydroxyl groups, iodo groups, isoprenyl groups, myristoyl groups, flavin groups, palmitoyl groups, sulfate group, polyethylene glycol, etc.). In some embodiments, Plasmodium antigen polypeptides for use in accordance with the present invention have an amino acid sequence that is or includes a sequence identical to that of a Plasmodium polypeptide found in nature; in some embodiments Plasmodium antigen polypeptides have an amino acid sequence that is or includes a sequence identical to a characteristic portion (e.g., an immunogenic portion) of a Plasmodium polypeptide found in nature.

[0070] In certain embodiments, full length proteins are utilized as Plasmodium antigen polypeptides in vaccine compositions in accordance with the invention. In some embodiments one or more immunogenic portions of Plasmodium polypeptides are used. In certain embodiments, two or three or more immunogenic portions are utilized, as one or more separate polypeptides or linked together in one or more fusion polypeptides.

[0071] Plasmodium antigen polypeptides for use in accordance with the present invention may include full-length Plasmodium polypeptides, fusions thereof, and/or immunogenic portions thereof. Where portions of Plasmodium proteins are utilized, whether alone or in fusion proteins, such portions retain immunological activity (e.g., cross-reactivity with anti-Plasmodium antibodies). The present invention encompasses the recognition that Pfs25 polypeptides, Pfs28 polypeptides, Pfs48/45 polypeptides, and/or Pfs230 polypeptides are antigens of interest in generating vaccines.

[0072] Thus, the invention provides plant cells and plants expressing a heterologous protein (e.g., a Plasmodium antigen polypeptide, such as a Plasmodium protein or immunogenic portion thereof, or a fusion protein comprising a Plasmodium protein or immunogenic portion thereof). A heterologous protein in accordance with the invention can comprise any Plasmodium antigen polypeptide of interest, including, but not limited to Pfs25 polypeptides, Pfs28 polypeptides, Pfs48/45 polypeptides, and Pfs230 polypeptides, portions thereof, immunogenic portions thereof, fusions thereof, and/or combinations thereof.

[0073] Amino acid sequences of a variety of different Plasmodium Pfs25 polypeptides, Pfs28 polypeptides, Pfs48/45 polypeptides, and/or Pfs230 polypeptides (e.g., from different species and/or strains) are known in the art and are available in public databases such as GenBank. Exemplary full length protein sequences for Pfs25 polypeptides, Pfs28 polypeptides, Pfs48/45 polypeptides, and Pfs230 polypeptides of multiple Plasmodium species and/or strains are provided in FIG. 1.

[0074] In certain embodiments, full length Pfs25 is utilized in vaccine compositions in accordance with the invention. In some embodiments one or more domains of Pfs25 can be used. In certain embodiments, two or three or more domains can be utilized, as one or more separate polypeptides or linked together in one or more fusion polypeptides. Sequences of exemplary Pfs25 polypeptides are presented in FIG. 1.

[0075] In certain embodiments, full length Pfs28 antigen is utilized in vaccine antigens in accordance with the invention. In some embodiments, a domain of Pfs28 can be used. In certain embodiments two or three or more domains can be used as antigens in accordance with the invention. Certain exemplary embodiments provide a Plasmodium l antigen polypeptide comprising full length Pfs28, lacking a transmembrane anchor peptide sequence. Sequences of exemplary Pfs28 polypeptides are presented in FIG. 1.

[0076] In certain embodiments, full length Pfs48/45 antigen is utilized in vaccine antigens in accordance with the invention. In some embodiments, a domain of Pfs48/45 can be used. In certain embodiments two or three or more domains can be used as antigens in accordance with the invention. Certain exemplary embodiments provide a Plasmodium antigen polypeptide comprising full length Pfs48/45, lacking a transmembrane anchor peptide sequence. Sequences of exemplary Pfs48/45 polypeptides are presented in FIG. 1.

[0077] In certain embodiments, full length Pfs230 antigen is utilized in vaccine antigens in accordance with the invention. In some embodiments, a domain of Pfs230 is used. In certain embodiments two or three or more domains are provided in antigens in accordance with the invention. Certain exemplary embodiments provide a Plasmodium antigen polypeptide comprising full length Pfs230. Sequences of exemplary Pfs230 polypeptides are presented in FIG. 1.

[0078] Also provided are fusion proteins. Fusions can include a modified lichenase B sequence of SEQ ID NO: 40. Examples of fusion proteins are shown in FIG. 24; amino acid sequences corresponding to Plasmodium polypeptides or portions thereof are underlined. A fusion protein can be a polypeptide having an amino acid sequence of any one of SEQ ID NOs: 152, 154, 156, 158, 160, 162, 164, 166, 168, 170, 172, 174, 176, 178, 180, 182, 184, 186, 188, 190, 192, 194, 196, 198, 200, 202, 204, 206, 208, 210, 212, 214, 216, 218, 220, 224, 226, 228, 230, 232, 234, 236, 238, 240, 242, 244, 246, 248, 250, 252, and 254. In some embodiments a fusion protein can be a polypeptide having at least 90%, at least 95%, at least 98%, at least 99% sequence identity to an amino acid sequence of any one of SEQ ID NOs: 152, 154, 156, 158, 160, 162, 164, 166, 168, 170, 172, 174, 176, 178, 180, 182, 184, 186, 188, 190, 192, 194, 196, 198, 200, 202, 204, 206, 208, 210, 212, 214, 216, 218, 220, 224, 226, 228, 230, 232, 234, 236, 238, 240, 242, 244, 246, 248, 250, 252, and 254.

[0079] In some embodiments, a fusion protein construct can include additional sequences, for example, a leader sequences and/or a His/KDEL tag. Examples of fusion protein constructs comprising leader sequences (italics) and His/KDEL tags are shown in Table 24 and can include polypeptides having the amino acid sequence of SEQ ID NO's: 44, 46, 48, 50, 52, 54, 57, 59, 61, 62, 64, 66, 68, 70, 72, 74, 76, 78, 80, 82, 84, 86, 88, 90, 92, 94, 97, 99, 101, 103, 105, 107, 109, 111, 113, 115, 117, 119, 121, 123, 125, 127, 129, 131, 133, 135, 137, 139, 141, 143, 145, 147 and 149.

[0080] In addition, the Exemplification presents several additional Plasmodium polypeptide sequences that can be used in accordance with the present invention.

[0081] While sequences of exemplary Plasmodium antigen polypeptides are provided herein, it will be appreciated that any sequence having immunogenic characteristics of Pfs25 polypeptides, Pfs28 polypeptides, Pfs48/45 polypeptides, and/or Pfs230 polypeptides may be employed. In some embodiments, a Plasmodium antigen polypeptide for use in accordance with the present invention has an amino acid sequence which is about 60% identical, about 70% identical, about 80% identical, about 85% identical, about 90% identical, about 91% identical, about 92% identical, about 93% identical, about 94% identical, about 95% identical, about 96% identical, about 97% identical, about 98% identical, about 99% identical, or 100% identical to a sequence selected from any of the sequences set forth in FIG. 1. In some embodiments, such a Plasmodium antigen polypeptide retains immunogenic activity.

[0082] In some embodiments, a Plasmodium antigen polypeptide for use in accordance with the present invention has an amino acid sequence which comprises about 50 to about 700 contiguous amino acids of a sequence selected from any of the sequences set forth in FIG. 1. In some embodiments, a Plasmodium antigen polypeptide has an amino acid sequence which is about 60% identical, about 70% identical, about 80% identical, about 85% identical, about 90% identical, about 91% identical, about 92% identical, about 93% identical, about 94% identical, about 95% identical, about 96% identical, about 97% identical, about 98% identical, about 99% identical, or 100% identical to a contiguous stretch of about 100 amino acids of a sequence selected from any of the sequences set forth in FIG. 1.

[0083] In some embodiments, a Plasmodium antigen polypeptide for use in accordance with the present invention has an amino acid sequence which comprises about 150, about 200, about 250, about 300, about 350, about 400, about 450, about 500, about 550, or more contiguous amino acids of a sequence selected from any of the sequences set forth in FIG. 1. In some embodiments, a Plasmodium antigen polypeptide has an amino acid sequence which is about 60% identical, about 70% identical, about 80% identical, about 85% identical, about 90% identical, about 91% identical, about 92% identical, about 93% identical, about 94% identical, about 95% identical, about 96% identical, about 97% identical, about 98% identical, about 99% identical, or 100% identical to a contiguous stretch of about 150, 200, 250, 300, 350, or more amino acids of a sequence selected from any of the sequences set forth in FIG. 1.

[0084] For example, sequences having sufficient identity to Plasmodium antigen polypeptide(s) which retain immunogenic characteristics are capable of binding with antibodies which react with one or more antigens provided herein. Immunogenic characteristics often include three dimensional presentation of relevant amino acids or side groups. One skilled in the art can readily identify sequences with modest differences in sequence (e.g., with difference in boundaries and/or some sequence alternatives, that, nonetheless preserve immunogenic characteristics).

[0085] In some embodiments, particular portions and/or domains of any of the exemplary sequences set forth in FIG. 1 may be omitted from a Plasmodium polypeptide. For example, Pfs25, Pfs28, and Pfs48/45 polypeptides typically contain a transmembrane anchor sequence. Pfs25, Pfs28, and Pfs48/45 polypeptides in which the transmembrane anchor sequence has been omitted are contemplated by the invention.

[0086] As exemplary antigens, we have utilized particular sequences from Plasmodium parasites of particular species as described in detail herein. Various species of Plasmodium parasites exist and continue to be identified as new subtypes emerge. It will be understood by one skilled in the art that the methods and compositions provided herein may be adapted to utilize sequences of additional speceis. Such variation is contemplated and encompassed within the methods and compositions provided herein.

Plasmodium Polypeptide Fusions with Thermostable Proteins

[0087] In certain aspects, provided are Plasmodium antigen polypeptide(s) comprising fusion polypeptides which comprise a Plasmodium protein (or a portion or variant thereof) operably linked to a thermostable protein. Inventive fusion polypeptides can be produced in any available expression system known in the art. In certain embodiments, inventive fusion proteins are produced in a plant or portion thereof (e.g., plant, plant cell, root, sprout, etc.).

[0088] Enzymes or other proteins which are not found naturally in humans or animal cells are particularly appropriate for use in fusion polypeptides of the present invention. Thermostable proteins that, when fused, confer thermostability to a fusion product are useful. Thermostability allows produced protein to maintain conformation, and maintain produced protein at room temperature. This feature facilitates easy, time efficient and cost effective recovery of a fusion polypeptide. A representative family of thermostable enzymes useful in accordance with the invention is the glucanohydrolase family. These enzymes specifically cleave 1,4-β glucosidic bonds that are adjacent to 1,3-β linkages in mixed linked polysaccharides (Hahn et al., 1994 Proc. Natl. Acad. Sci., USA, 91:10417; incorporated herein by reference). Such enzymes are found in cereals, such as oat and barley, and are also found in a number of fungal and bacterial species, including C. thermocellum (Goldenkova et al., 2002, Mol. Biol. 36:698; incorporated herein by reference). Thus, desirable thermostable proteins for use in fusion polypeptides of the present invention include glycosidase enzymes. Exemplary thermostable glycosidase proteins include those represented by GenBank accession numbers selected from those set forth in Table 1, the contents of each of which are incorporated herein by reference by entire incorporation of the GenBank accession information for each referenced number. Exemplary thermostable enzymes of use in fusion proteins in accordance with the invention include Clostridium thermocellum P29716, Brevibacillus brevis P37073, and Rhodthermus marinus P45798, each of which are incorporated herein by reference to their GenBank accession numbers. Representative fusion proteins utilize modified thermostable enzyme isolated from Clostridium thermocellum, however, any thermostable protein may be similarly utilized in accordance with the present invention. Exemplary thermostable glycosidase proteins are listed in Table 1:

TABLE 1
Thermostable Glycosidase Proteins

| GenBank | | |
|---|---|---|
| Accession | Strain | Thermostable Protein Sequence |
| P29716 | Beta- | 5′MKNRVISLLMASLLLVLSVIVAPFYKAEAATVVNTPFVAV |
| | glucanase | FSNFDSSQWEADWANGSVFNCVWKPSQVTFSNGKMILTLD |
| | Clostridium | REYGGSYPYKSGEYRTKSFFGYGYYEVRMKAAKNVGIVSSF |
| | thermocellum | FTYTGPSDNNPWDEIDIEFLGKDTTKVQFNWYKNGVGGNE |
| | | YLHNLGFDASQDFHTYGFEWRPDYIDFYVDGKKVYRGTRN |
| | | IPVTPGKIMMNLWPGIGVDEWLGRYDGRTPLQAEYEYVKY |
| | | YPNGVPQDNPTPTPTIAPSTPTNPNLPLKGDVNGDGHVNSSD |
| | | YSLFKRYLLRVIDRFPVGDQSVADVNRDGRIDSTDLTMLKR |
| | | YLIRAIPSL 3′ |
| | | (SEQ ID NO: 1) |
| P37073 | Beta- | 5′MVKSKYLVFISVFSLLFGVFVVGFSHQGVKAEEERPMGTA |
| | glucanase | FYESFDAFDDERWSKAGVWTNGQMFNATWYPEQVTADGL |
| | Brevibacillus | MRLTIAKKTTSARNYKAGELRTNDFYHYGLFEVSMKPAKV |
| | brevis | EGTVSSFFTYTGEWDWDGDPWDEIDIEFLGKDTTRIQFNYFT |
| | | NGVGGNEFYYDLGFDASESFNTYAFEWREDSITWYVNGEA |
| | | VHTATENIPQTPQKIMMNLWPGVGVDGWTGVFDGDNTPVY |
| | | SYYDWVRYTPLQNYQIHQ 3′ |
| | | (SEQ ID NO: 2) |
| P17989 | Beta- | 5′MNIKKTAVKSALAVAAAAAALTTNVSAKDFSGAELYTLE |
| | glucanase | EVQYGKFEARMKMAAASGTVSSMFLYQNGSEIADGRPWVE |
| | Fibrobacter | VDIEVLGKNPGSFQSNIITGKAGAQKTSEKHHAVSPAADQAF |
| | succinogenes | HTYGLEWTPNYVRWTVDGQEVRKTEGGQVSNLTGTQGLR |
| | | FNLWSSESAAWVGQFDESKLPLFQFINWVKVYKYTPGQGE |
| | | GGSDFTLDWTDNFDTFDGSRWGKGDWTFDGNRVDLTDKNI |
| | | YSRDGMLILALTRKGQESENGQVPRDDEPAPQSSSSAPASSS |
| | | SVPASSSSVPASSSSAFVPPSSSSATNAIHGMRTTPAVAKEHR |
| | | NLVNAKGAKVNPNGHKRYRVNFEH 3′ |
| | | (SEQ ID NO: 3) |
| P07883 | Extracellu- | 5′MVNRRDLIKWSAVALGAGAGLAGPAPAAHAADLEWEQY |
| | lar agarase | PVPAAPGGNRSWQLLPSHSDDFNYTGKPQTFRGRWLDQHK |
| | Streptomyces | DGWSGPANSLYSARHSWVADGNLIVEGRRAPDGRVYCGY |
| | coelicolor | VTSRTPVEYPLYTEVLMRVSGLKLSSNFWLLSRDDVNEIDVI |
| | | ECYGNESLHGKHMNTAYHIFQRNPFTELARSQKGYFADGSY |
| | | GYNGETGQVFGDGAGQPLLRNGFHRYGVHWISATEFDFYF |
| | | NGRLVRRLNRSNDLRDPRSRFFDQPMHLILNTESHQWRVDR |
| | | GIEPTDAELADPSINNIYYRWVRTYQAV 3′ |
| | | (SEQ ID NO: 4) |
| P23903 | Glucan | 5′MKPSHFTEKRFMKKVLGLFLVVVMLASVGVLPTSKVQAA |
| | endo-13- | GTTVTSMEYFSPADGPVISKSGVGKASYGFVMPKFNGGSAT |
| | beta- | WNDVYSDVGVNVKVGNNWVDIDQAGGYIYNQNWGHWSD |
| | glucosidase | GGFNGYWFTLSATTEIQLYSKANGVKLEYQLVFQNINKTTIT |
| | A1 Bacillus | AMNPTQGPQITASFTGGAGFTYPTFNNDSAVTYEAVADDLK |
| | circulans | VYVKPVNSSSWIDIDNNAASGWIYDHNFGQFTDGGGGYWF |
| | | NVTESINVKLESKTSSANLVYTITFNEPTRNSYVITPYEGTTF |
| | | TADANGSIGIPLPKIDGGAPIAKELGNFVYQININGQWVDLS |
| | | NSSQSKFAYSANGYNNMSDANQWGYWADYIYGLWFQPIQ |
| | | ENMQIRIGYPLNGQAGGNIGNNFVNYTFIGNPNAPRPDVSD |
| | | QEDISIGTPTDPAIAGMNLIWQDEFNGTTLDTSKWNYETGY |
| | | YLNNDPATWGWGNAELQHYTNSTQNVYVQDGKLNIKAMN |
| | | DSKSFPQDPNRYAQYSSGKINTKDKLSLKYGRVDFRAKLPT |
| | | GDGVWPALWMLPKDSVYGTWAASGEIDVMEARGRLPGSV |
| | | SGTIHFGGQWPVNQSSGGDYHFPEGQTFANDYHVYSVVWE |
| | | EDNIKWYVDGKFFYKVTNQQWYSTAAPNNPNAPFDEPFYLI |
| | | MNLAVGGNFDGGRTPNASDIPATMQVDYVRVYKEQ 3′ |
| | | (SEQ ID NO: 5) |
| P27051 | Beta- | 5′MSYRVKRMLMLLVTGLFLSLSTFAASASAQTGGSFYEPFN |
| | glucanase | NYNTGLWQKADGYSNGNMFNCTWRANNVSMTSLGEMRL |
| | Bacillus | SLTSPSYNKFDCGENRSVQTYGYGLYEVNMKPAKNVGIVSS |
| | licheniformis | FFTYTGPTDGTPWDEIDIEFLGKDTTKVQFNYYTNGVGNHE |
| | | KIVNLGFDAANSYHTYAFDWQPNSIKWYVDGQLKHTATTQ |
| | | IPQTPGKIMMNLWNGAGVDEWLGSYNGVTPLSRSLHWVRY |
| | | TKR 3′ |
| | | (SEQ ID NO: 6) |
| P45797 | Beta- | 5′MMKKKSWFTLMITGVISLFFSVSAFAGNVFWEPLSYFNSS |
| | glucanase | TWQKADGYSNGQMFNCTWRANNVNFTNDGKLKLSLTSPA |
| | Paenibacillus | NNKFDCGEYRSTNNYGYGLYEVSMKPAKNTGIVSSFFTYTG |
| | polymyxa | PSHGTQWDEIDIEFLGKDTTKVQFNYYTNGVGGHEKIINLGF |
| | Bacillus | DASTSFHTYAFDWQPGYIKWYVDGVLKHTATTNIPSTPGKI |
| | polymyxa | MMNLWNGTGVDSWLGSYNGANPLYAEYDWVKYTSN 3′ |
| | | (SEQ ID NO: 7) |
| P37073 | Beta- | 5′MVKSKYLVFISVFSLLFGVFVVGFSHQGVKAEEERPMGTA |
| | glucanase | FYESFDAFDDERWSKAGVWTNGQMFNATWYPEQVTADGL |
| | Brevibacillus | MRLTIAKKTTSARNYKAGELRTNDFYHYGLFEVSMKPAKV |
| | brevis | EGTVSSFFTYTGEWDWDGDPWDEIDIEFLGKDTTRIQFNYFT |
| | | NGVGGNEFYYDLGFDASESFNTYAFEWREDSITWYVNGEA |
| | | VHTATENIPQTPQKIMMNLWPGVGVDGWTGVFDGDNTPVY |
| | | SYYDWVRYTPLQNYQIHQ 3′ |
| | | (SEQ ID NO: 8) |
| P45798 | Beta- | 5′MCTMPLMKLKKMMRRTAFLLSVLIGCSMLGSDRSDKAPH |
| | glucanase | WELVWSDEFDYSGLPDPEKWDYDVGGHGWGNQELQYYTR |
| | Rhodothermus | ARIENARVGGGVLIIEARHEPYEGREYTSARLVTRGKASWT |
| | marinus | YGRFEIRARLPSGRGTWPAIWMLPDRQTYGSAYWPDNGEID |
| | | IMEHVGFNPDVVHGTVHTKAYNHLLGTQRGGSIRVPTARTD |
| | | FHVYAIEWTPEEIRWFVDDSLYYRFPNERLTDPEADWRHWP |
| | | FDQPFHLIMNIAVGGAWGGQQGVDPEAFPAQLVVDYVRVY |
| | | RWVE 3′ |
| | | (SEQ ID NO: 9) |
| P38645 | Beta- | 5′MTESAMTSRAGRGRGADLVAAVVQGHAAASDAAGDLSF |
| | glucosidase | PDGFIWGAATAAYQIEGAWREDGRGLWDVFSHTPGKVASG |
| | Thermobispora | HTGDIACDHYHRYADDVRLMAGLGDRVYRFSVAWPRIVPD |
| | bispora | GSGPVNPAGLDFYDRLVDELLGHGITPYPTLYHWDLPQTLE |
| | | DRGGWAARDTAYRFAEYALAVHRRLGDRVRCWITLNEPW |
| | | VAAFLATHRGAPGAADVPRFRAVHHLLLGHGLGLRLRSAG |
| | | AGQLGLTLSLSPVIEARPGVRGGGRRVDALANRQFLDPALR |
| | | GRYPEEVLKIMAGHARLGHPGRDLETIHQPVDLLGVNYYSH |
| | | VRLAAEGEPANRLPGSEGIRFERPTAVTAWPGDRPDGLRTL |
| | | LLRLSRDYPGVGLIITENGAAFDDRADGDRVHDPERIRYLTA |
| | | TLRAVHDAIMAGADLRGYFVWSVLDNFEWAYGYHKRGIV |
| | | YVDYTTMRRIPRESALWYRDVVRRNGLRNGE 3′ |
| | | (SEQ ID NO: 10) |
| P40942 | Celloxy- | 5′MNKFLNKKWSLILTMGGIFLMATLSLIFATGKKAFNDQTS |
| | lanase | AEDIPSLAEAFRDYFPIGAAIEPGYTTGQIAELYKKHVNMLV |
| | Clostridium | AENAMKPASLQPTEGNFQWADADRIVQFAKENGMELRFHT |
| | stercorarium | LVWHNQTPTGFSLDKEGKPMVEETDPQKREENRKLLLQRL |
| | | ENYIRAVVLRYKDDIKSWDVVNEVIEPNDPGGMRNSPWYQI |
| | | TGTEYIEVAFRATREAGGSDIKLYINDYNTDDPVKRDILYEL |
| | | VKNLLEKGVPIDGVGHQTHIDIYNPPVERIIESIKKFAGLGLD |
| | | NIITELDMSIYSWNDRSDYGDSIPDYILTLQAKRYQELFDAL |
| | | KENKDIVSAVVFWGISDKYSWLNGFPVKRTNAPLLFDRNFM |
| | | PKPAFWAIVDPSRLRE 3′ |
| | | (SEQ ID NO: 11) |
| P14002 | Beta- | 5′MAVDIKKIIKQMTLEEKAGLCSGLDFWHTKPVERLGIPSIM |
| | glucosidase | MTDGPHGLRKQREDAEIADINNSVPATCFPSAAGLACSWDR |
| | Clostridium | ELVERVGAALGEECQAENVSILLGPGANIKRSPLCGRNFEYF |
| | thermocellum | SEDPYLSSELAASHIKGVQSQGVGACLKHFAANNQEHRRMT |
| | | VDTIVDERTLREIYFASFENAVKKARPWVVMCAYNKLNGE |
| | | YCSENRYLLTEVLKNEWMHDGFVVSDWGAVNDRVSGLDA |
| | | GLDLEMPTSHGITDKKIVEAVKSGKLSENILNRAVERILKVIF |
| | | MALENKKENAQYDKDAHHRLARQAAAESMVLLKNEDDVL |
| | | PLKKSGTIALIGAFVKKPRYQGSGSSHITPTRLDDIYEEIKKA |
| | | GGDKVNLVYSEGYRLENDGIDEELINEAKKAASSSDVAVVF |
| | | AGLPDEYESEGFDRTHMSIPENQNRLIEAVAEVQSNIVVVLL |
| | | NGSPVEMPWIDKVKSVLEAYLGGQALGGALADVLFGEVNP |
| | | SGKLAETFPVKLSHNPSYLNFPGEDDRVEYKEGLFVGYRYY |
| | | DTKGIEPLFPFGHGLSYTKFEYSDISVDKKDVSDNSIINVSVK |
| | | VKNVGKMAGKEIVQLYVKDVKSSVRRPEKELKGFEKVFLN |
| | | PGEEKTVTFTLDKRAFAYYNTQIKDWHVESGEFLILIGRSSR |
| | | DIVLKESVRVNSTVKIRKRFTVNSAVEDVMSDSSAAAVLGP |
| | | VLKEITDALQIDMDNAHDMMAANIKNMPLRSLVGYSQGRL |
| | | SEEMLEELVDKINNVE 3′ |
| | | (SEQ ID NO: 12) |
| O33830 | Alpha- | 5′MPSVKIGIIGAGSAVFSLRLVSDLCKTPGLSGSTVTLMDID |
| | glucosidase | EERLDAILTIAKKYVEEVGADLKFEKTMNLDDVIIDADFVIN |
| | Thermotoga | TAMVGGHTYLEKVRQIGEKYGYYRGIDAQEFNMVSDYYTF |
| | maritima | SNYNQLKYFVDIARKIEKLSPKAWYLQAANPIFEGTTLVTRT |
| | | VPIKAVGFCHGHYGVMEIVEKLGLEEEKVDWQVAGVNHGI |
| | | WLNRFRYNGGNAYPLLDKWIEEKSKDWKPENPFNDQLSPA |
| | | AIDMYRFYGVMPIGDTVRNSSWRYHRDLETKKKWYGEPW |
| | | GGADSEIGWKWYQDTLGKVTEITKKVAKFIKENPSVRLSDL |
| | | GSVLGKDLSEKQFVLEVEKILDPERKSGEQHIPFIDALLNDN |
| | | KARFVVNIPNKGIIHGIDDDVVVEVPALVDKNGIHPEKIEPPL |
| | | PDRVVKYYLRPRIMRMEMALEAFLTGDIRIIKELLYRDPRTK |
| | | SDEQVEKVIEEILALPENEEMRKHYLKR 3′ |
| | | (SEQ ID NO: 13) |
| O43097 | Xylanase | 5′MVGFTPVALAALAATGALAFPAGNATELEKRQTTPNSEG |
| | Thermomyces | WHDGYYYSWWSDGGAQATYTNLEGGTYEISWGDGGNLV |
| | lanuginosus | GGKGWNPGLNARAIHFEGVYQPNGNSYLAVYGWTRNPLV |
| | | EYYIVENFGTYDPSSGATDLGTVECDGSIYRLGKTTRVNAPS |
| | | IDGTQTFDQYWSVRQDKRTSGTVQTGCHFDAWARAGLNV |
| | | NGDHYYQIVATEGYFSSGYARITVADVG 3′ |
| | | (SEQ ID NO: 14) |
| P54583 | Endo- | 5′MPRALRRVPGSRVMLRVGVVVAVLALVAALANLAVPRP |
| | glucanase | ARAAGGGYWHTSGREILDANNVPVRIAGINWFGFETCNYV |
| | E1 Acidothermus | VHGLWSRDYRSMLDQIKSLGYNTIRLPYSDDILKPGTMPNSI |
| | cellulolyticus | NFYQMNQDLQGLTSLQVMDKIVAYAGQIGLRIILDRHRPDC |
| | | SGQSALWYTSSVSEATWISDLQALAQRYKGNPTVVGFDLH |
| | | NEPHDPACWGCGDPSIDWRLAAERAGNAVLSVNPNLLIFVE |
| | | GVQSYNGDSYWWGGNLQGAGQYPVVLNVPNRLVYSAHD |
| | | YATSVYPQTWFSDPTFPNNMPGIWNKNWGYLFNQNIAPVW |
| | | LGEFGTTLQSTTDQTWLKTLVQYLRPTAQYGADSFQWTFW |
| | | SWNPDSGDTGGILKDDWQTVDTVKDGYLAPIKSSIFDPVGA |
| | | SASPSSQPSPSVSPSPSPSPSASRTPTPTPTPTASPTPTLTPTATP |
| | | TPTASPTPSPTAASGARCTASYQVNSDWGNGFTVTVAVTNS |
| | | GSVATKTWTVSWTFGGNQTITNSWNAAVTQNGQSVTARN |
| | | MSYNNVIQPGQNTTFGFQASYTGSNAAPTVACAAS 3′ |
| | | (SEQ ID NO: 15) |
| P14288 | β-galactosidase | 5′MLSFPKGFKFGWSQSGFQSEMGTPGSEDPNSDWHVWVH |
| | Sulfolobus | DRENIVSQVVSGDLPENGPGYWGNYKRFHDEAEKIGLNAV |
| | acidocaldarius | RINVEWSRIFPRPLPKPEMQTGTDKENSPVISVDLNESKLRE |
| | | MDNYANHEALSHYRQILEDLRNRGFHIVLNMYHWTLPIWL |
| | | HDPIRVRRGDFTGPTGWLNSRTVYEFARFSAYVAWKLDDL |
| | | ASEYATMNEPNVVWGAGYAFPRAGFPPNYLSFRLSEIAKW |
| | | NIIQAHARAYDAIKSVSKKSVGIIYANTSYYPLRPQDNEAVEI |
| | | AERLNRWSFFDSIIKGEITSEGQNVREDLRNRLDWIGVNYYT |
| | | RTVVTKAESGYLTLPGYGDRCERNSLSLANLPTSDFGWEFF |
| | | PEGLYDVLLKYWNRYGLPLYVMENGIADDADYQRPYYLVS |
| | | HIYQVHRALNEGVDVRGYLHWSLADNYEWSSGFSMRFGLL |
| | | KVDYLTKRLYWRPSALVYREITRSNGIPEELEHLNRVPPIKP |
| | | LRH 3′ |
| | | (SEQ ID NO: 16) |
| O52629 | β-galactosidase | 5′MFPEKFLWGVAQSGFQFEMGDKLRRNIDTNTDWWHWVR |
| | Pyrococcus | DKTNIEKGLVSGDLPEEGINNYELYEKDHEIARKLGLNAYRI |
| | woesei | GIEWSRIFPWPTTFIDVDYSYNESYNLIEDVKITKDTLEELDEI |
| | | ANKREVAYYRSVINSLRSKGFKVIVNLNHFTLPYWLHDPIEA |
| | | RERALTNKRNGWVNPRTVIEFAKYAAYIAYKFGDIVDMWS |
| | | TFNEPMVVVELGYLAPYSGEPPGVLNPEAAKLAILHMINAH |
| | | ALAYRQIKKFDTEKADICDSKEPAEVGIIYNNIGVAYPKDPN |
| | | DSKDVKAAENDNFEHSGLFFEAIHKGKLNIEFDGETFIDAPY |
| | | LKGNDWIGVNYYTREVVTYQEPMFPSIPLITFKGVQGYGYA |
| | | CRPGTLSKDDRPVSDIGWELYPEGMYDSIVEAHKYGVPVYV |
| | | TENGIADSKDILRPYYIASHIKMTEKAFEDGYEVKGYFHWA |
| | | LTDNFEWALGFRMRFGLYEVNLITKERIPREKSVSIFREIVAN |
| | | NGVTKKIEEELLRG 3′ |
| | | (SEQ ID NO: 17) |
| P29094 | Oligo-16- | 5′MERVWWKEAVVYQIYPRSFYDSNGDGIGDIRGIIAKLDYL |
| | glucosidase | KELGVDVVWLSPVYKSPNDDNGYDISDYRDIMDEFGTMAD |
| | Geobacillus | WKTMLEEMHKRGIKLVMDLVVNHTSDEHPWFIESRKSKDN |
| | thermogluco- | PYRDYYIWRPGKNGKEPNNWESVFSGSAWEYDEMTGEYYL |
| | sidasius | HLFSKKQPDLNWENPKVRREVYEMMKFWLDKGVDGFRMD |
| | | VINMISKVPELPDGEPQSGKKYASGSRYYMNGPRVHEFLQE |
| | | MNREVLSKYDIMTVGETPGVTPKEGILYTDPSRRELNMVFQ |
| | | FEHMDLDSGPGGKWDIRPWSLADLKKTMTKWQKELEGKG |
| | | WNSLYLNNHDQPRAVSRFGDDGKYRVESAKMLATFLHMM |
| | | QGTPYIYQGEEIGMTNVRFPSIEDYRDIETLNMYKERVEEYG |
| | | EDPQEVMEKIYYKGRDNARTPMQWDDSENAGFTAGTPWIP |
| | | VNPNYKEINVKAALEDPNSVFHYYKKLIQLRKQHDIIVYGT |
| | | YDLILEDDPYIYRYTRTLGNEQLIVITNESEKTPVERLPDHIIY |
| | | KTKELLISNYDVDEAEELKEIRLRPWEARVYKIRLP 3′ |
| | | (SEQ ID NO: 18) |
| P49067 | Alpha- | 5′MGDKINFIFGIHNHQPLGNFGWVFEEAYEKCYWPFLETLE |
| | amylase | EYPNMKVAIHTSGPLIEWLQDNRPEYIDLLRSLVKRGQVEIV |
| | Pyrococcus | VAGFYEPVLASIPKEDRIEQIRLMKEWAKSIGFDARGVWLTE |
| | furiosus | RVWQPELVKTLKESGIDYVIVDDYHFMSAGLSKEELYWPY |
| | | YTEDGGEVIAVFPIDEKLRYLIPFRPVDKVLEYLHSLIDGDES |
| | | KVAVFHDDGEKFGIWPGTYEWVYEKGWEREFFDRISSDEKI |
| | | NLMLYTEYLEKYKPRGLVYLPIASYFEMSEWSLPAKQARLF |
| | | VEFVNELKVKGIFEKYRVFVRGGIWKNFFYKYPESNYMHK |
| | | RMLMVSKLVRNNPEARKYLLRAQCNDAYWHGLFGGVYLP |
| | | HLRRAIWNNLIKANSYVSLGKVIRDIDYDGFEEVLIENDNFY |
| | | AVFKPSYGGSLVEFSSKNRLVNYVDVLARRWEHYHGYVES |
| | | QFDGVASIHELEKKIPDEIRKEVAYDKYRRFMLQDHVVPLG |
| | | TTLEDFMFSRQQEIGEFPRVPYSYELLDGGIRLKREHLGIEVE |
| | | KTVKLVNDGFEVEYIVNNKTGNPVLFAVELNVAVQSIMESP |
| | | GVLRGKEIVVDDKYAVGKFALKFEDEMEVWKYPVKTLSQS |
| | | ESGWDLIQQGVSYIVPIRLEDKIRFKLKFEEASG 3′ |
| | | (SEQ ID NO: 19) |
| JC7532 | Cellulase | 5′MMLRKKTKQLISSILILVLLLSLFPAALAAEGNTREDNFKH |
| | Bacillus | LLGNDNVKRPSEAGALQLQEVDGQMTLVDQHGEKIQLRGM |
| | species | STHGLQWFPEILNDNAYKALSNDWDSNMIRLAMYVGENGY |
| | | ATNPELIKQRVIDGIELAIENDMYVIVDWHVHAPGDPRDPV |
| | | YAGAKDFFREIAALYPNNPHIIYELANEPSSNNNGGAGIPNN |
| | | EEGWKAVKEYADPIVEMLRKSGNADDNIIIVGSPNWSQRPD |
| | | LAADNPIDDHHTMYTVHFYTGSHAASTESYPSETPNSERGN |
| | | VMSNTRYALENGVAVFATEWGTSQASGDGGPYFDEADVWI |
| | | EFLNENNISWANWSLTNKNEVSGAFTPFELGKSNATNLDPG |
| | | PDHVWAPEELSLSGEYVRARIKGVNYEPIDRTKYTKVLWDF |
| | | NDGTKQGFGVNSDSPNKELIAVDNENNTLKVSGLDVSNDVS |
| | | DGNFWANARLSANGWGKSVDILGAEKLTMDVIVDEPTTVA |
| | | IAAIPQSSKSGWANPERAVRVNAEDFVQQTDGKYKAGLTIT |
| | | GEDAPNLKNIAFHEEDNNMNNIILFVGTDAADVIYLDNIKVI |
| | | GTEVEIPVVHDPKGEAVLPSVFEDGTRQGWDWAGESGVKT |
| | | ALTIEEANGSNALSWEFGYPEVKPSDNWATAPRLDFWKSDL |
| | | VRGENDYVAFDFYLDPVRATEGAMNINLVFQPPTNGYWVQ |
| | | APKTYTINFDELEEANQVNGLYHYEVKINVRDITNIQDDTLL |
| | | RNMMIIFADVESDFAGRVFVDNVRFEGAATTEPVEPEPVDP |
| | | GEETPPVDEKEAKKEQKEAEKEEKEAVKEEKKEAKEEKKA |
| | | VKNEAKKK 3′ |
| | | (SEQ ID NO: 20) |
| Q60037 | Xylanase A | 5′MQVRKRRGLLDVSTAVLVGILAGFLGVVLAASGVLSFGK |
| | Thermotoga | EASSKGDSSLETVLALSFEGTTEGVVPFGKDVVLTASQDVA |
| | maritima | ADGEYSLKVENRTSPWDGVEIDLTGKVKSGADYLLSFQVY |
| | | QSSDAPQLFNVVARTEDEKGERYDVILDKVVVSDHWKEILV |
| | | PFSPTFEGTPAKYSLIIVASKNTNFNFYLDKVQVLAPKESGPK |
| | | VIYETSFENGVGDWQPRGDVNIEASSEVAHSGKSSLFISNRQ |
| | | KGWQGAQINLKGILKTGKTYAFEAWVYQNSGQDQTIIMTM |
| | | QRKYSSDASTQYEWIKSATVPSGQWVQLSGTYTIPAGVTVE |
| | | DLTLYFESQNPTLEFYVDDVKIVDTTSAEIKIEMEPEKEIPAL |
| | | KEVLKDYFKVGVALPSKVFLNPKDIELITKHFNSITAENEMK |
| | | PESLLAGIENGKLKFRFETADKYIQFVEENGMVIRGHTLVW |
| | | HNQTPDWFFKDENGNLLSKEAMTERLKEYIHTVVGHFKGK |
| | | VYAWDVVNEAVDPNQPDGLRRSTWYQIMGPDYIELAFKFA |
| | | READPDAKLFYNDYNTFEPRKRDIIYNLVKDLKEKGLIDGIG |
| | | MQCHISLATDIKQIEEAIKKESTIPGIEIHITELDMSVYRDSSSN |
| | | YPEAPRTALIEQAHKMMQLFEIFKKYSNVITNVTFWGLKDD |
| | | YSWRATRRNDWPLIFDKDHQAKLAYWAIVAPEVLPPLPKES |
| | | RISEGEAVVVGMMDDSYLMSKPIEILDEEGNVKATIRAVWK |
| | | DSTIYIYGEVQDKTKKPAEDGVAIFINPNNERTPYLQPDDTY |
| | | AVLWTNWKTEVNREDVQVKKFVGPGFRRYSFEMSITIPGVE |
| | | FKKDSYIGFDAAVIDDGKWYSWSDTTNSQKTNTMNYGTLK |
| | | LEGIMVATAKYGTPVIDGEIDEIWNTTEEIETKAVAMGSLDK |
| | | NATAKVRVLWDENYLYVLAIVKDPVLNKDNSNPWEQDSV |
| | | EIFIDENNHKTGYYEDDDAQFRVNYMNEQTFGTGGSPARFK |
| | | TAVKLIEGGYIVEAAIKWKTIKPTPNTVIGFNIQVNDANEKG |
| | | QRVGIISWSDPTNNSWRDPSKFGNLRLIK 3′ |
| | | (SEQ ID NO: 21) |
| P33558 | Xylanase A | 5′MKRKVKKMAAMATSIIMAIMIILHSIPVLAGRIIYDNETGT |
| | Clostridium | HGGYDYELWKDYGNTIMELNDGGTFSCQWSNIGNALFRKG |
| | stercorarium | RKFNSDKTYQELGDIVVEYGCDYNPNGNSYLCVYGWTRNP |
| | | LVEYYIVESWGSWRPPGATPKGTITQWMAGTYEIYETTRVN |
| | | QPSIDGTATFQQYWSVRTSKRTSGTISVTEHFKQWERMGMR |
| | | MGKMYEVALTVEGYQSSGYANVYKNEIRIGANPTPAPSQSP |
| | | IRRDAFSIIEAEEYNSTNSSTLQVIGTPNNGRGIGYIENGNTVT |
| | | YSNIDFGSGATGFSATVATEVNTSIQIRSDSPTGTLLGTLYVS |
| | | STGSWNTYQTVSTNISKITGVHDIVLVFSGPVNVDNFIFSRSS |
| | | PVPAPGDNTRDAYSIIQAEDYDSSYGPNLQIFSLPGGGSAIGY |
| | | IENGYSTTYKNIDFGDGATSVTARVATQNATTIQVRLGSPSG |
| | | TLLGTIYVGSTGSFDTYRDVSATISNTAGVKDIVLVFSGPVN |
| | | VDWFVFSKSGT 3′ |
| | | (SEQ ID NO: 22) |
| P05117 | Polygalact- | 5′MVIQRNSILLLIIIFASSISTCRSNVIDDNLEFQVYDNILEQEF |
| | uronase-2 | AHDFQAYLSYLSKNIESNNNIDKVDKNGIKVINVLSFGAKG |
| | precursor | DGKTYDNIAFEQAWNEACSSRTPVQFVVPKNKNYLLKQITF |
| | Solanum | SGPCRSSISVKIFGSLEASSKISDYKDRRLWIAFDSVQNLVVG |
| | lycopersicum | GGGTINGNGQVWWPSSCKINKSLPCRDAPTALTFWNCKNL |
| | | KVNNLKSKNAQQIHIKFESCTNVVASNLMINASAKSPNTDG |
| | | VHVSNTQYIQISDTIIGTGDDCISIVSGSQNVQATNITCGPGH |
| | | GISIGSLGSGNSEAYVSNVTVNEAKIIGAENGVRIKTWQGGS |
| | | GQASNIKFLNVEMQDVKYPIIIDQNYCDRVEPCIQQFSAVQV |
| | | KNVVYENIKGTSATKVAIKFDCSTNFPCEGIIMENINLVGESG |
| | | KPSEATCKNVHFNNAEHVTPHCTSLEISEDEALLYNY 3′ |
| | | (SEQ ID NO: 23) |
| P04954 | Cellulase D | 5′MSRMTLKSSMKKRVLSLLIAVVFLSLTGVFPSGLIETKVSA |
| | Clostridium | AKITENYQFDSRIRLNSIGFIPNHSKKATIAANCSTFYVVKED |
| | thermocellum | GTIVYTGTATSMFDNDTKETVYIADFSSVNEEGTYYLAVPG |
| | | VGKSVNFKIAMNVYEDAFKTAMLGMYLLRCGTSVSATYNG |
| | | IHYSHGPCHTNDAYLDYINGQHTKKDSTKGWHDAGDYNK |
| | | YVVNAGITVGSMFLAWEHFKDQLEPVALEIPEKNNSIPDFLD |
| | | ELKYEIDWILTMQYPDGSGRVAHKVSTRNEGGFIMPENEHD |
| | | ERFFVPWSSAATADEVAMTAMAARIFRPYDPQYAEKCINAA |
| | | KVSYEFLKNNPANVFANQSGFSTGEYATVSDADDRLWAAA |
| | | EMWETLGDEEYLRDFENRAAQFSKKIEADFDWDNVANLG |
| | | MFTYLLSERPGKNPALVQSIKDSLLSTADSIVRTSQNHGYGR |
| | | TLGTTYYWGCNGTVVRQTMILQVANKISPNNDYVNAALDA |
| | | ISHVFGRNYYNRSYVTGLGINPPMNPHDRRSGADGIWEPWP |
| | | GYLVGGGWPGPKDWVDIQDSYQTNEIAINWNAALIYALAG |
| | | FVNYNSPQNEVLYGDVNDDGKVNSTDLTLLKRYVLKAVST |
| | | LPSSKAEKNADVNRDGRVNSSDVTILSRYLIRVIEKLPI 3′ |
| | | (SEQ ID NO: 24) |
| Q4J929 | N- | 5′MLRSLVLNEKLRARVLERAEEFLLNNKADEEVWFRELVL |
| | glycosylase | CILTSNSSFISAYKSMNYILDKILYMDEKEISILLQESGYRFYN |
| | Sulfolobus | LKAKYLYRAKNLYGKVKKTIKEIADKDQMQAREFIATHIYG |
| | acidocaldarius | IGYKEASHFLRNVGYLDLAIIDRHILRFINNLGIPIKLKSKREY |
| | | LLAESLLRSIANNLNVQVGLLDLFIFFKQTNTIVK 3′ |
| | | (SEQ ID NO: 25) |
| O33833 | Beta- | 5′MFKPNYHFFPITGWMNDPNGLIFWKGKYHMFYQYNPRKP |
| | fructosidase | EWGNICWGHAVSDDLVHWRHLPVALYPDDETHGVFSGSA |
| | Thermotoga | VEKDGKMFLVYTYYRDPTHNKGEKETQCVAMSENGLDFV |
| | maritima | KYDGNPVISKPPEEGTHAFRDPKVNRSNGEWRMVLGSGKD |
| | | EKIGRVLLYTSDDLFHWKYEGVIFEDETTKEIECPDLVRIGE |
| | | KDILIYSITSTNSVLFSMGELKEGKLNVEKRGLLDHGTDFYA |
| | | AQTFFGTDRVVVIGWLQSWLRTGLYPTKREGWNGVMSLPR |
| | | ELYVENNELKVKPVDELLALRKRKVFETAKSGTFLLDVKEN |
| | | SYEIVCEFSGEIELRMGNESEEVVITKSRDELIVDTTRSGVSG |
| | | GEVRKSTVEDEATNRIRAFLDSCSVEFFFNDSIAFSFRIHPEN |
| | | VYNILSVKSNQVKLEVFELENIWL 3′ |
| | | (SEQ ID NO: 26) |
| P49425 | Endo-14- | 5′MAGPHRSRAAGPPPFAVDEHVALEMVAFRGEVFAGHGLL |
| | beta-manno- | ADQRLIAHTGRPALNAQRITQQKQRDQCRGQRHRHHQGGR |
| | sidase | NLRKAHRTFHEHQSTQDQAHDAPHGQQAKTGHEGLGHEH |
| | Rhodothermus | AQAQHQQGQSNVVDRQDGEPVEAQHQKDGAQRAGNAPA |
| | marinus | GRVELEQQPVEAQHQQQEGDVRIGKRRQNAFAPPALDHVH |
| | | GGPGRLQRHGLAVERHVPAVQQHQQRVQRGRQQIDHVLG |
| | | HGLPGRQRLAFRDGPRRPVGVASPVLGQRPCPGHRIVQNLF |
| | | RHGIDPCRVGRCRRSPSELHGMGCADVRARGHGRHMRGQR |
| | | DEHPGRGRPCARRRHVDDDRDRTPQEKLYDVARGLDEPAR |
| | | RVHFDDEADRSVFRGLAQPAPDEPEGRRRDRLVLQRQSVN |
| | | HRRGRLSRHRQQHQPQQQRPHGNQAFLGKYEKRRRKPTAC |
| | | LKSLRRFPDKDAPVLYFVNQLEKTKRRMTLLLVWLIFTGVA |
| | | GEIRLEAEDGELLGVAVDSTLTGYSGRGYVTGFDAPEDSVR |
| | | FSFEAPRGVYRVVFGVSFSSRFASYALRVDDWHQTGSLIKR |
| | | GGGFFEASIGEIWLDEGAHTMAFQLMNGALDYVRLEPVSY |
| | | GPPARPPAQLSDSQATASAQALFAFLLSEYGRHILAGQQQNP |
| | | YRRDFDAINYVRNVTGKEPALVSFDLIDYSPTREAHGVVHY |
| | | QTPEDWIAWAGRDGIVSLMWHWNAPTDLIEDPSQDCYWW |
| | | YGFYTRCTTFDVAAALADTSSERYRLLLRDIDVIAAQLQKF |
| | | QQADIPVLWRPLHEAAGGWFWWGAKGPEPFKQLWRLLYE |
| | | RLVHHHGLHNLIWVYTHEPGAAEWYPGDAYVDIVGRDVY |
| | | ADDPDALMRSDWNELQTLFGGRKLVALTETGTLPDVEVITD |
| | | YGIWWSWFSIWTDPFLRDVDPDRLTRVYHSERVLTRDELPD |
| | | WRSYVLHATTVQPAGDLALAVYPNPGAGRLHVEVGLPVAA |
| | | PVVVEVFNLLGQRVFQYQAGMQPAGLWRRAFELALAPGV |
| | | YLVQVRAGNLVARRRWVSVR 3′ |
| | | (SEQ ID NO: 27) |
| P06279 | Alpha- | 5′MLTFHRIIRKGWMFLLAFLLTALLFCPTGQPAKAAAPFNG |
| | amylase | TMMQYFEWYLPDDGTLWTKVANEANNLSSLGITALWLPPA |
| | Geobacillus | YKGTSRSDVGYGVYDLYDLGEFNQKGAVRTKYGTKAQYL |
| | stearothermo- | QAIQAAHAAGMQVYADVVFDHKGGADGTEWVDAVEVNP |
| | philus | SDRNQEISGTYQIQAWTKFDFPGRGNTYSSFKWRWYHFDG |
| | | VDWDESRKLSRIYKFRGIGKAWDWEVDTENGNYDYLMYA |
| | | DLDMDHPEVVTELKSWGKWYVNTTNIDGFRLDAVKHIKFS |
| | | FFPDWLSDVRSQTGKPLFTVGEYWSYDINKLHNYIMKTNGT |
| | | MSLFDAPLHNKFYTASKSGGTFDMRTLMTNTLMKDQPTLA |
| | | VTFVDNHDTEPGQALQSWVDPWFKPLAYAFILTRQEGYPC |
| | | VFYGDYYGIPQYNIPSLKSKIDPLLIARRDYAYGTQHDYLDH |
| | | SDIIGWTREGVTEKPGSGLAALITDGPGGSKWMYVGKQHA |
| | | GKVFYDLTGNRSDTVTINSDGWGEFKVNGGSVSVWVPRKT |
| | | TVSTIAWSITTRPWTDEFVRWTEPRLVAWP 3′ |
| | | (SEQ ID NO: 28) |
| P45702 | Xylanase | 5′MPTNLFFNAHHSPVGAFASFTLGFPGKSGGLDLELARPPR |
| P45703 | Geobacillus | QNVLIGVESLHESGLYHVLPFLETAEEDESKRYDIENPDPNP |
| P40943 | stearotherm- | QKPNILIPFAKEEIQREFHVATDTWKAGDLTFTIYSPVKAVP |
| | ophilus | NPETADEEELKLALVPAVIVEMTIDNTNGTRARRAFFGFEGT |
| | | DPYTSMRRIDDTCPQLRGVGQGRILSIVSKDEGVRSALHFSM |
| | | EDILTAQLEENWTFGLGKVGALIVDVPAGEKKTYQFAVCFY |
| | | RGGYVTAGMDASYFYTRFFQNIEEVGLYALEQAEVLKEQSF |
| | | RSNKLIEKEWLSDDQTFMMAHAIRSYYGNTQLLEHEGKPIW |
| | | VVNEGEYRMMNTFDLTVDQLFFELKLNPWTVKNVLDLYVE |
| | | RYSYEDRVRFPGEETEYPSGISFTHDMGVANTFSRPHYSSYE |
| | | LYGISGCFSHMTHEQLVNWVLCAAVYIEQTKDWAWRDKR |
| | | LAILEQCLESMVRRDHPDPEQRNGVMGLDSTRTMGGAEITT |
| | | YDSLDVSLGQARNNLYLAGKCWAAYVALEKLFRDVGKEE |
| | | LAALAGEQAEKCAATIVSHVTDDGYIPAIMGEGNDSKIIPAIE |
| | | GLVFPYFTNCHEALDENGRFGAYIQALRNHLQYVLREGICL |
| | | FPDGGWKISSTSNNSWLSKIYLCQFIARHILGWEWDEQGKR |
| | | ADAAHVAWLTHPTLSIWSWSDQIIAGEITGSKYYPRGVTSIL |
| | | WLEEGE 3′ |
| | | (SEQ ID NO: 29) |
| | | 5′MCSSIPSLREVFANDFRIGAAVNPVTLEAQQSLLIRHVNSL |
| | | TAENHMKFEHLQPEEGRFTFDIAIKSSTSPFSSHGVRGHTLV |
| | | WHNQTPSWVFQDSQGHFVGRDVLLERMKSHISTVVQRYKG |
| | | KVYCWDVINEAVADEGSEWLRSSTWRQIIGDDFIQQAFLYA |
| | | HEADPEALLFYNDYNECFPEKREKIYTLVKSLRDKGIPIHGIG |
| | | MQAHWSLNRPTLDEIRAAIERYASLGVILHITELDISMFEFDD |
| | | HRKDLAAPTNEMVERQAERYEQIFSLFKEYRDVIQNVTFWG |
| | | IADDHTWLDHFPVQGRKNWPLLFDEQHNPKPAFWRVVNI |
| | | 3′ |
| | | (SEQ ID NO: 30) |
| | | 5′MRNVVRKPLTIGLALTLLLPMGMTATSAKNADSYAKKPH |
| | | ISALNAPQLDQRYKNEFTIGAAVEPYQLQNEKDVQMLKRHF |
| | | NSIVAENVMKPISIQPEEGKFNFEQADRIVKFAKANGMDIRF |
| | | HTLVWHSQVPQWFFLDKEGKPMVNETDPVKREQNKQLLL |
| | | KRLETHIKTIVERYKDDIKYWDVVNEVVGDDGKLRNSPWY |
| | | QIAGIDYIKVAFQAARKYGGDNIKLYMNDYNTEVEPKRTAL |
| | | YNLVKQLKEEGVPIDGIGHQSHIQIGWPSEAEIEKTINMFAAL |
| | | GLDNQITELDVSMYGWPPRAYPTYDAIPKQKFLDQAARYD |
| | | RLFKLYEKLSDKISNVTFWGIADNHTWLDSRADVYYDANG |
| | | NVVVDPNAPYAKVEKGKGKDAPFVFGPDYKVKPAYWAIID |
| | | HK 3′ |
| | | (SEQ ID NO: 31) |
| P09961 | Alpha- | 5′MTKSIYFSLGIHNHQPVGNFDFVIERAYEMSYKPLINFFFK |
| | amylase 1 | HPDFPINVHFSGFLLLWLEKNHPEYFEKLKIMAERGQIEFVS |
| | Dictyoglomus | GGFYEPILPIIPDKDKVQQIKKLNKYIYDKFGQTPKGMWLAE |
| | thermophilum | RVWEPHLVKYIAEAGIEYVVVDDAHFFSVGLKEEDLFGYYL |
| | | MEEQGYKLAVFPISMKLRYLIPFADPEETITYLDKFASEDKS |
| | | KIALLFDDGEKFGLWPDTYRTVYEEGWLETFVSKIKENFLL |
| | | VTPVNLYTYMQRVKPKGRIYLPTASYREMMEWVLFPEAQK |
| | | ELEELVEKLKTENLWDKFSPYVKGGFWRNFLAKYDESNHM |
| | | QKKMLYVWKKVQDSPNEEVKEKAMEEVFQGQANDAYWH |
| | | GIFGGLYLPHLRTATYEHLIKAENYLENSEIRFNIFDFDCDGN |
| | | DEIIVESPFFNLYLSPNHGGSVLEWDFKTKAFNLTNVLTRRK |
| | | EAYHSKLSYVTSEAQGKSIHERWTAKEEGLENILFYDNHRR |
| | | VSFTEKIFESEPVLEDLWKDSSRLEVDSFYENYDYEINKDEN |
| | | KIRVLFSGVFRGFELCKSYILYKDKSFVDVVYEIKNVSETPIS |
| | | LNFGWEINLNFLAPNHPDYYFLIGDQKYPLSSFGIEKVNNW |
| | | KIFSGIGIELECVLDVEASLYRYPIETVSLSEEGFERVYQGSAL |
| | | IHFYKVDLPVGSTWRTTIRFWVK 3′ |
| | | (SEQ ID NO: 32) |
| Q60042 | Xylanase A | 5′MRKKRRGFLNASTAVLVGILAGFLGVVLAATGALGFAVR |
| | Thermotoga | ESLLLKQFLFLSFEGNTDGASPFGKDVVVTASQDVAADGEY |
| | neapolitana | SLKVENRTSVWDGVEIDLTGKVNTGTDYLLSFHVYQTSDSP |
| | | QLFSVLARTEDEKGERYKILADKVVVPNYWKEILVPFSPTFE |
| | | GTPAKFSLIITSPKKTDFVFYVDNVQVLTPKEAGPKVVYETS |
| | | FEKGIGDWQPRGSDVKISISPKVAHSGKKSLFVSNRQKGWH |
| | | GAQISLKGILKTGKTYAFEAWVYQESGQDQTIIMTMQRKYS |
| | | SDSSTKYEWIKAATVPSGQWVQLSGTYTIPAGVTVEDLTLY |
| | | FESQNPTLEFYVDDVKVVDTTSAEIKLEMNPEEEIPALKDVL |
| | | KDYFRVGVALPSKVFINQKDIALISKHSNSSTAENEMKPDSL |
| | | LAGIENGKLKFRFETADKYIEFAQQNGMVVRGHTLVWHNQ |
| | | TPEWFFKDENGNLLSKEEMTERLREYIHTVVGHFKGKVYA |
| | | WDVVNEAVDPNQPDGLRRSTWYQIMGPDYIELAFKFAREA |
| | | DPNAKLFYNDYNTFEPKKRDIIYNLVKSLKEKGLIDGIGMQC |
| | | HISLATDIRQIEEAIKKESTIPGIEIHITELDISVYRDSTSNYSEA |
| | | PRTALIEQAHKMAQLFKIFKKYSNVITNVTFWGLKDDYSWR |
| | | ATRRNDWPLIFDKDYQAKLAYWAIVAPEVLPPLPKESKISEG |
| | | EAVVVGMMDDSYMMSKPIEIYDEEGNVKATIRAIWKDSTIY |
| | | VYGEVQDATKKPAEDGVAIFINPNNERTPYLQPDDTYVVLW |
| | | TNWKSEVNREDVEVKKFVGPGFRRYSFEMSITIPGVEFKKD |
| | | SYIGFDVAVIDDGKWYSWSDTTNSQKTNTMNYGTLKLEGV |
| | | MVATAKYGTPVIDGEIDDIWNTTEEIETKSVAMGSLEKNAT |
| | | AKVRVLWDEENLYVLAIVKDPVLNKDNSNPWEQDSVEIFID |
| | | ENNHKTGYYEDDDAQFRVNYMNEQSFGTGASAARFKTAV |
| | | KLIEGGYIVEAAIKWKTIKPSPNTVIGFNVQVNDANEKGQRV |
| | | GIISWSDPTNNSWRDPSKFGNLRLIK 3′ |
| | | (SEQ ID NO: 33) |
| AAN05438 | Beta- | 5′MDDHAEKFLWGVATSAYQIEGATQEDGRGPSIWDAFARR |
| AAN05439 | glycosidase | PGAIRDGSTGEPACDHYRRYEEDIALMQSLGVRAYRFSVAW |
| | Thermus | PRILPEGRGRINPKGLAFYDRLVDRLLASGITPFLTLYHWDLP |
| | thermophilus | LALEERGGWRSRETAFAFAEYAEAVARALADRVPFFATLNE |
| | | PWCSAFLGHWTGEHAPGLRNLEAALRAAHHLLLGHGLAVE |
| | | ALRAAGARRVGIVLNFAPAYGEDPEAVDVADRYHNRYFLD |
| | | PILGKGYPESPFRDPPPVPILSRDLELVARPLDFLGVNYYAPV |
| | | RVAPGTGTLPVRYLPPEGPATAMGWEVYPEGLHHLLKRLG |
| | | REVPWPLYVTENGAAYPDLWTGEAVVEDPERVAYLEAHVE |
| | | AALRAREEGVDLRGYFVWSLMDNFEWAFGYTRRFGLYYV |
| | | DFPSQRRIPKRSALWYRERIARAQT 3′ |
| | | (SEQ ID NO: 34) |
| | | 5′MTENAEKFLWGVATSAYQIEGATQEDGRGPSIWDAFAQR |
| | | PGAIRDGSTGEPACDHYRRYEEDIALMQSLGVRAYRFSVAW |
| | | PRILPEGRGRINPKGLAFYDRLVDRLLASGITPFLTLYHWDLP |
| | | LALEERGGWRSRETAFAFAEYAEAVARALADRVPFFATLNE |
| | | PWCSAFLGHWTGEHAPGLRNLEAALRAAHHLLLGHGLAVE |
| | | ALRAAGARRVGIVLNFAPAYGEDPEAVDVADRYHNRFFLD |
| | | PILGKGYPESPFRDPPPVPILSRDLELVARPLDFLGVNYYAPV |
| | | RVAPGTGTLPVRYLPPEGPATAMGWEVYPEGLYHLLKRLG |
| | | REVPWPLYVTENGAAYPDLWTGEAVVEDPERVAYLEAHVE |
| | | AALRAREEGVDLRGYFVWSLMDNFEWAFGYTRRFGLYYV |
| | | DFPSQRRIPKRSALWYRERIARAQT 3′ |
| | | (SEQ ID NO: 35) |
| AAN05437 | Sugar | 5′MAQVGRGASPLSRARVPPLPHPLDGEHLPHDPAGGGHGK |
| | permease | ASSQDAPVGQLPGHLARPAFFHYLKNSFLVCSLTTVFALAV |
| | Thermus | ATFAGYALARFRFPGAELFGGSVLVTQVIPGILFLIPIYIMYIY |
| | thermophilus | VQNWVRSALGLEVRLVGSYGGLVFTYTAFFVPLSIWILRGF |
| | | FASIPKELEEAAMVDGATPFQAFHRVILPLALPGLAATAVYI |
| | | FLTAWDELLFAQVLTTEATATVPVGIRNFVGNYQNRYDLV |
| | | MAAATVATLPVLVLFFFVQRQLIQGLTAGAVKG 3′ |
| | | (SEQ ID NO: 36) |
| AAN05440 | Beta- | 5′MAENAEKFLWGVATSAYQIEGATQEDGRGPSIWDTFARR |
| | glycosidase | PGAIRDGSTGEPACDHYHRYEEDIALMQSLGVGVYRFSVA |
| | Thermus | WPRILPEGRGRINPKGLAFYDRLVDRLLAAGITPFLTLYHWD |
| | filiformis | LPQALEDRGGWRSRETAFAFAEYAEAVARALADRVPFFATL |
| | | NEPWCSAFLGHWTGEHAPGLRNLEAALRAAHHLLLGHGLA |
| | | VEALRAAGAKRVGIVLNFAPVYGEDPEAVDVADRYHNRYF |
| | | LDPILGRGYPESPFQDPPPTPNLSRDLELVARPLDFLGVNYY |
| | | APVRVAPGTGPLPVRYLPPEGPVTAMGWEVYPEGLYHLLK |
| | | RLGREVPWPLYITENGAAYPDLWTGEAVVEDPERVAYLEA |
| | | HVEAALRAREEGVDLRGYFVWSLMDNFEWAFGYTRRFGL |
| | | YYVDFPSQRRIPKRSALWYRERIARAQL 3′ |
| | | (SEQ ID NO: 37) |
| AAD43138 | Beta- | 5′MKFPKDFMIGYSSSPFQFEAGIPGSEDPNSDWWVWVHDPE |
| | glycosidase | NTAAGLVSGDFPENGPGYWNLNQNDHDLAEKLGVNTIRVG |
| | Thermosphaera | VEWSRIFPKPTFNVKVPVERDENGSIVHVDVDDKAVERLDE |
| | aggregans | LANKEAVNHYVEMYKDWVERGRKLILNLYHWPLPLWLHN |
| | | PIMVRRMGPDRAPSGWLNEESVVEFAKYAAYIAWKMGELP |
| | | VMWSTMNEPNVVYEQGYMFVKGGFPPGYLSLEAADKARR |
| | | NMIQAHARAYDNIKRFSKKPVGLIYAFQWFELLEGPAEVFD |
| | | KFKSSKLYYFTDIVSKGSSIINVEYRRDLANRLDWLGVNYYS |
| | | RLVYKIVDDKPIILHGYGELCTPGGISPAENPCSDFGWEVYPE |
| | | GLYLLLKELYNRYGVDLIVTENGVSDSRDALRPAYLVSHVY |
| | | SVWKAANEGIPVKGYLHWSLTDNYEWAQGFRQKFGLVMV |
| | | DFKTKKRYLRPSALVFREIATHNGIPDELQHLTLIQ 3′ |
| | | (SEQ ID NO: 38) |

[0089] While sequences of exemplary thermostable polypeptides are provided herein, it will be appreciated that any sequence exhibiting thermostability may be employed. In some embodiments, a thermostable polypeptide for use in accordance with the present invention has an amino acid sequence which is about 60% identical, about 70% identical, about 80% identical, about 85% identical, about 90% identical, about 91% identical, about 92% identical, about 93% identical, about 94% identical, about 95% identical, about 96% identical, about 97% identical, about 98% identical, about 99% identical, or 100% identical to a sequence selected from the group consisting of SEQ ID NOs: 1-40. In some embodiments, such a thermostable polypeptide retains thermostability.

[0090] In some embodiments, a thermostable polypeptide has an amino acid sequence which comprises about 100 contiguous amino acids of a sequence selected from the group consisting of SEQ ID NOs: 1-40. In some embodiments, a thermostable polypeptide has an amino acid sequence which is about 60% identical, about 70% identical, about 80% identical, about 85% identical, about 90% identical, about 91% identical, about 92% identical, about 93% identical, about 94% identical, about 95% identical, about 96% identical, about 97% identical, about 98% identical, about 99% identical, or 100% identical to a contiguous stretch of about 100 amino acids of a sequence selected from the group consisting of SEQ ID NOs: 1-40.

[0091] In some embodiments, a thermostable polypeptide has an amino acid sequence which comprises about 150, about 200, about 250, about 300, about 350, about 400, about 450, about 500, about 550, about 600, about 650, about 700, or more contiguous amino acids of a sequence selected from the group consisting of SEQ ID NOs: 1-40. In some embodiments, a thermostable polypeptide has an amino acid sequence which is about 60% identical, about 70% identical, about 80% identical, about 85% identical, about 90% identical, about 91% identical, about 92% identical, about 93% identical, about 94% identical, about 95% identical, about 96% identical, about 97% identical, about 98% identical, about 99% identical, or 100% identical to a contiguous stretch of about 150, 200, 250, 300, 350, or more amino acids of a sequence selected from the group consisting of SEQ ID NO: 1-40.

[0092] When designing fusion proteins and polypeptides in accordance with the invention, it is desirable, of course, to preserve immunogenicity of the antigen. Still further, it is desirable in certain aspects to provide constructs which provide thermostability of a fusion protein. This feature facilitates easy, time efficient and cost effective recovery of a target antigen. In certain aspects, antigen fusion partners may be selected which provide additional advantages, including enhancement of immunogenicity, potential to incorporate multiple vaccine determinants, yet lack prior immunogenic exposure to vaccination subjects. Further beneficial qualities of fusion peptides of interest include proteins which provide ease of manipulation for incorporation of one or more antigens, as well as proteins which have potential to confer ease of production, purification, and/or formulation for vaccine preparations. One of ordinary skill in the art will appreciate that three dimensional presentation can affect each of these beneficial characteristics. Preservation of immunity or preferential qualities therefore may affect, for example, choice of fusion partner and/or choice of fusion location (e.g., N-terminus, C-terminus, internal, combinations thereof). Alternatively or additionally, preferences may affects length of segment selected for fusion, whether it be length of antigen, or length of fusion partner selected.

[0093] The present inventors have demonstrated successful fusion of a variety of antigens with a thermostable protein. For example, the present inventors have used the thermostable carrier molecule LicB, also referred to as lichenase, for production of fusion proteins. LicB is 1,3-1,4-β glucanase (LicB) from Clostridium thermocellum (GenBank accession: X63355 [gi:40697]): MKNRVISLLMASLLLVLSVIVAPFYKAEAATVVNTPFVAVFSNFDSSQWEKADWAN GSVFNCVWKPSQVTFSNGKMILTLDREYGGSYPYKSGEYRTKSFFGYGYYEVRMKA AKNVGIVSSFFTYTGPSDNNPWDEIDIEFLGKDTTKVQFNWYKNGVGGNEYLHNLG FDASQDFHTYGFEWRPDYIDFYVDGKKVYRGTRNIPVTPGKIMMNLWPGIGVDEWL GRYDGRTPLQAEYEYVKYYPNGVPQDNPTPTPTIAPSTPTNPNLPLKGDVNGDGHVN SSDYSLFKRYLLRVIDRFPVGDQSVADVNRDGRIDSTDLTMLKRYLIRAIPSL (SEQ ID NO: 39). LicB belongs to a family of globular proteins. Based on the three dimensional structure of LicB, its N- and C-termini are situated close to each other on the surface, in close proximity to the active domain. LicB also has a loop structure exposed on the surface that is located far from the active domain. We have generated constructs such that the loop structure and N- and C-termini of protein can be used as insertion sites for Plasmodium antigen polypeptides. Plasmodium antigen polypeptides can be expressed as N- or C-terminal fusions or as inserts into the surface loop. Importantly, LicB maintains its enzymatic activity at low pH and at high temperature (up to 75° C.). Thus, use of LicB as a carrier molecule contributes advantages, including likely enhancement of target specific immunogenicity, potential to incorporate multiple vaccine determinants, and straightforward formulation of vaccines that may be delivered nasally, orally or parenterally. Furthermore, production of LicB fusions in plants should reduce the risk of contamination with animal or human pathogens. See examples provided herein.

[0094] Fusion proteins in accordance with the invention comprising Plasmodium antigen polypeptides may be produced in any of a variety of expression systems, including both in vitro and in vivo systems. One skilled in the art will readily appreciate that optimization of nucleic acid sequences for a particular expression system is often desirable. For example, an exemplary optimized sequence for expression of Plasmodium antigen-LicB fusions in plants is provided, and is shown in SEQ ID NO: 40: 5′MGFVLFSOLPSFLLVSTLLLFLVISHSCRAONGGSYPYKSGEYRTKSFFGYGYYE VRMKAAKNVGIVSSFFTYTGPSDNNPWDEIDIEFLGKDTTKVQFNWYKNGVGGNEY LHNLGFDASQDFHTYGFEWRPDYIDFYVDGICKVYRGTRNIPVTPGKIMMNLWPGIG VDEWLGRYDGRTPLQAEYEYVKYYPNGrskIVVNTPFVAVFSNFDSSQWEKADWAN GSVFNCVWKPSQVTFSNGKMILTLDREYvdHHHHHHKDEL 3′ (SEQ ID NO: 40). Note that in SEQ ID NO: 40, the bold/underlined portion corresponds to the signal sequence, the italicized/underlined portion corresponds to the 6×His tag and endoplasmic reticulum retention sequence, and the two portions in lowercase letters correspond to restriction sites.

[0095] Thus, any relevant nucleic acid encoding Plasmodium antigen polypeptide(s), fusion protein(s), and immunogenic portions thereof in accordance with the invention is intended to be encompassed within nucleic acid constructs in accordance with the invention.

[0096] For production in plant systems, transgenic plants expressing Plasmodium antigen(s) (e.g., Plasmodium polypeptide(s), fusion(s) thereof, and/or immunogenic portion(s) thereof) may be utilized. Alternatively or additionally, transgenic plants may be produced using methods well known in the art to generate stable production crops. Additionally, plants utilizing transient expression systems may be utilized for production of Plasmodium antigen polypeptide(s). When utilizing plant expression systems, whether transgenic or transient expression in plants is utilized, any of nuclear expression, chloroplast expression, mitochondrial expression, or viral expression may be taken advantage of according to the applicability of the system to antigen desired. Furthermore, additional expression systems for production of antigens and fusion proteins in accordance with the present invention may be utilized. For example, mammalian expression systems (e.g., mammalian cell lines [e.g., CHO, etc.]), bacterial expression systems (e.g., E. coli), insect expression systems (e.g., baculovirus), yeast expression systems, and in vitro expression systems (e.g., reticulate lysates) may be used for expression of antigens and fusion proteins in accordance with the invention.

### Production of Plasmodium Antigens

[0097] In accordance with the present invention, Plasmodium antigens (including Plasmodium polypeptide(s), fusions thereof, and/or immunogenic portions thereof) may be produced in any desirable system; production is not limited to plant systems. Vector constructs and expression systems are well known in the art and may be adapted to incorporate use of Plasmodium antigen polypeptides provided herein. For example, Plasmodium antigen polypeptides can be produced in known expression systems, including mammalian cell systems, transgenic animals, microbial expression systems, insect cell systems, and plant systems, including transgenic and transient plant systems. Particularly where Plasmodium antigen polypeptides are produced as fusion proteins, it may be desirable to produce such fusion proteins in non-plant systems.

[0098] In some embodiments, Plasmodium antigen polypeptides are desirably produced in plant systems. Plants are relatively easy to manipulate genetically, and have several advantages over alternative sources such as human fluids, animal cell lines, recombinant microorganisms and transgenic animals. Plants have sophisticated post-translational modification machinery for proteins that is similar to that of mammals (although it should be noted that there are some differences in glycosylation patterns between plants and mammals). This enables production of bioactive reagents in plant tissues. Also, plants can economically produce very large amounts of biomass without requiring sophisticated facilities. Moreover, plants are not subject to contamination with animal pathogens. Like liposomes and microcapsules, plant cells are expected to provide protection for passage of antigen to the gastrointestinal tract.

[0099] Plants may be utilized for production of heterologous proteins via use of various production systems. One such system includes use of transgenic/genetically-modified plants where a gene encoding target product is permanently incorporated into the genome of the plant. Transgenic systems may generate crop production systems. A variety of foreign proteins, including many of mammalian origin and many vaccine candidate antigens, have been expressed in transgenic plants and shown to have functional activity. (Tacket et al., 2000, J. Infect. Dis., 182:302; and Thanavala et al., 2005, Proc. Natl. Acad. Sci., USA, 102:3378; both of which are incorporated herein by reference). Additionally, administration of unprocessed transgenic plants expressing hepatitis B major surface antigen to non-immunized human volunteers resulted in production of immune response (Kapusta et al., 1999, FASEB J., 13:1796; incorporated herein by reference).

[0100] One system for expressing polypeptides in plants utilizes plant viral vectors engineered to express foreign sequences (e.g., transient expression). This approach allows for use of healthy non-transgenic plants as rapid production systems. Thus, genetically engineered plants and plants infected with recombinant plant viruses can serve as “green factories” to rapidly generate and produce specific proteins of interest. Plant viruses have certain advantages that make them attractive as expression vectors for foreign protein production. Several members of plant RNA viruses have been well characterized, and infectious cDNA clones are available to facilitate genetic manipulation. Once infectious viral genetic material enters a susceptible host cell, it replicates to high levels and spreads rapidly throughout the entire plant. There are several approaches to producing target polypeptides using plant viral expression vectors, including incorporation of target polypeptides into viral genomes. One approach involves engineering coat proteins of viruses that infect bacteria, animals or plants to function as carrier molecules for antigenic peptides. Such carrier proteins have the potential to assemble and form recombinant virus-like particles displaying desired antigenic epitopes on their surface. This approach allows for time-efficient production of vaccine candidates, since the particulate nature of a vaccine candidate facilitates easy and cost-effective recovery from plant tissue. Additional advantages include enhanced target-specific immunogenicity, the potential to incorporate multiple vaccine determinants, and ease of formulation into vaccines that can be delivered nasally, orally or parenterally. As an example, spinach leaves containing recombinant plant viral particles carrying epitopes of virus fused to coat protein have generated immune response upon administration (Modelska et al., 1998, Proc. Natl. Acad. Sci., USA, 95:2481; and Yusibov et al., 2002, Vaccine, 19/20:3155; both of which are incorporated herein by reference).

### Plant Expression Systems

[0101] The teachings of the present invention are applicable to a wide variety of different plants. In general, any plants that are amendable to expression of introduced constructs as described herein are useful in accordance with the present invention. In many embodiments, it will be desirable to use young plants in order to improve the speed of protein/polypeptide production. As indicated here, in many embodiments, sprouted seedlings are utilized. As is known in the art, most sprouts are quick growing, edible plants produced from storage seeds. However, those of ordinary skill in the art will appreciate that the term “sprouted seedling” has been used herein in a more general context, to refer to young plants whether or not of a variety typically classified as “sprouts.” Any plant that is grown long enough to have sufficient green biomass to allow introduction and/or expression of an expression construct as provided for herein (recognizing that the relevant time may vary depending on the mode of delivery and/or expression of the expression construct) can be considered a “sprouted seedling” herein.

[0102] In many embodiments, edible plants are utilized (i.e., plants that are edible by not toxic to—the subject to whom the protein or polypeptide is to be administered).

[0103] Any plant susceptible to incorporation and/or maintenance of heterologous nucleic acid and capable of producing heterologous protein may be utilized in accordance with the present invention. In general, it will often be desirable to utilize plants that are amenable to growth under defined conditions, for example in a greenhouse and/or in aqueous systems. It may be desirable to select plants that are not typically consumed by human beings or domesticated animals and/or are not typically part of the human food chain, so that they may be grown outside without concern that expressed polynucleotide may be undesirably ingested. In some embodiments, however, it will be desirable to employ edible plants. In particular embodiments, it will be desirable to utilize plants that accumulate expressed polypeptides in edible portions of a plant.

[0104] Often, certain desirable plant characteristics will be determined by the particular polynucleotide to be expressed. To give but a few examples, when a polynucleotide encodes a protein to be produced in high yield (as will often be the case, for example, when antigen proteins are to be expressed), it will often be desirable to select plants with relatively high biomass (e.g., tobacco, which has additional advantages that it is highly susceptible to viral infection, has a short growth period, and is not in the human food chain). Where a polynucleotide encodes antigen protein whose full activity requires (or is inhibited by) a particular post-translational modification, the ability (or inability) of certain plant species to accomplish relevant modification (e.g., a particular glycosylation) may direct selection. For example, plants are capable of accomplishing certain post-translational modifications (e.g., glycosylation), however, plants will not generate sialyation patterns which are found in mammalian post-translational modification. Thus, plant production of antigen may result in production of a different entity than the identical protein sequence produced in alternative systems.

[0105] In certain embodiments, crop plants, or crop-related plants are utilized. In certain specific embodiments, edible plants are utilized.

[0106] Plants for use in accordance with the present invention include Angiosperms, Bryophytes (e.g., Hepaticae, Musci, etc.), Pteridophytes (e.g., ferns, horsetails, lycopods), Gymnosperms (e.g., conifers, cycase, Ginko, Gnetales), and Algae (e.g., Chlorophyceae, Phaeophyceae, Rhodophyceae, Myxophyceae, Xanthophyceae, and Euglenophyceae). Exemplary plants are members of the family Leguminosae (Fabaceae; e.g., pea, alfalfa, soybean); Gramineae (Poaceae; e.g., corn, wheat, rice); Solanaceae, particularly of the genus Lycopersicon (e.g., tomato), Solanum (e.g., potato, eggplant), Capsium (e.g., pepper), or Nicotiana (e.g., tobacco); Umbelliferae, particularly of the genus Daucus (e.g., carrot), Apium (e.g., celery), or Rutaceae (e.g., oranges); Compositae, particularly of the genus Lactuca (e.g., lettuce); Brassicaceae (Cruciferae), particularly of the genus Brassica or Sinapis. In certain aspects, plants in accordance with the invention may be species of Brassica or Arabidopsis. Some exemplary Brassicaceae family members include Brassica campestris, B. carinata, B. juncea, B. napus, B. nigra, B. oleraceae, B. tournifortii, Sinapis alba, and Raphanus sativus. Some suitable plants that are amendable to transformation and are edible as sprouted seedlings include alfalfa, mung bean, radish, wheat, mustard, spinach, carrot, beet, onion, garlic, celery, rhubarb, a leafy plant such as cabbage or lettuce, watercress or cress, herbs such as parsley, mint, or clovers, cauliflower, broccoli, soybean, lentils, edible flowers such as sunflower etc.

[0107] A wide variety of plant species may be suitable in the practice of the present invention. A variety of different bean and other species including, for example, adzuki bean, alfalfa, barley, broccoli, bill jump pea, buckwheat, cabbage, cauliflower, clover, collard greens, fenugreek, flax, garbanzo bean, green pea, Japanese spinach, kale, kamut, kohlrabi, marrowfat pea, mung bean, mustard greens, pinto bean, radish, red clover, soy bean, speckled pea, sunflower, tobacco, turnip, yellow trapper pea, and others may be amenable to the production of heterologous proteins from viral vectors launched from an agrobacterial construct (e.g., introduced by agroinfiltration). In some embodiments, bill jump pea, green pea, marrowfat pea, speckled pea, and/or yellow trapper pea are particularly useful in accordance with this aspect of the invention. In certain embodiments, therefore, the present invention provides production of proteins or polypeptides (e.g., antigens) in one or more of these plants using an agrobacterial vector that launches a viral construct (i.e., an RNA with characteristics of a plant virus) encoding the relevant protein or polypeptide of interest. In some embodiments, the RNA has characteristics of (and/or includes sequences of) A1MV. In some embodiments, the RNA has characteristics of (and/or includes sequences of) TMV.

[0108] It will be appreciated that, in one aspect, the present invention provides young plants (e.g., sprouted seedlings) that express a target protein or polypeptide of interest. In some embodiments, the young plants were grown from transgenic seeds; the present invention also provides seeds which can be generated and/or utilized for the methods described herein. Seeds transgenic for any gene of interest can be sprouted and optionally induced for production of a protein or polypeptide of interest. For example, seeds capable of expressing any gene of interest can be sprouted and induced through: i) virus infection, ii) agroinfiltration, or iii) bacteria that contain virus genome. Seeds capable of expressing a transgene for any Pfs polypeptide can be sprouted and induced for production of full-length molecule through: i) virus infection, ii) agroinfiltration, or iii) inoculation with bacteria that contain virus genome. Seeds from healthy non-transgenic plants can be sprouted and used for producing target sequences through: i) virus infection, ii) agroinfiltration, or iii) inoculation with bacteria that contain a virus genome.

[0109] In some embodiments, the young plants were grown from seeds that were not transgenic. Typically, such young plants will harbor viral sequences that direct expression of the protein or polypeptide of interest. In some embodiments, the plants may also harbor agrobacterial sequences, optionally including sequences that “launched” the viral sequences.

[0110] Introducing Vectors Into Plants

[0111] In general, vectors may be delivered to plants according to known techniques. For example, vectors themselves may be directly applied to plants (e.g., via abrasive inoculations, mechanized spray inoculations, vacuum infiltration, particle bombardment, or electroporation). Alternatively or additionally, virions may be prepared (e.g., from already infected plants), and may be applied to other plants according to known techniques.

[0112] A wide variety of viruses are known that infect various plant species, and can be employed for polynucleotide expression according to the present invention (see, for example, in The Classification and Nomenclature of Viruses, “Sixth Report of the International Committee on Taxonomy of Viruses” (Ed. Murphy et al.), Springer Verlag: New York, 1995; Grierson et al., Plant Molecular Biology, Blackie, London, pp. 126-146, 1984; Gluzman et al., Communications in Molecular Biology: Viral Vectors, Cold Spring Harbor Laboratory, Cold Spring Harbor, N.Y., pp. 172-189, 1988; and Mathew, Plant Viruses Online; all of which are incorporated herein by reference). In certain embodiments, rather than delivering a single viral vector to a plant cell, multiple different vectors are delivered which, together, allow for replication (and, optionally cell-to-cell and/or long distance movement) of viral vector(s). Some or all of the proteins may be encoded by the genome of transgenic plants. In certain aspects, described in further detail herein, these systems include one or more viral vector components.

[0113] Vector systems that include components of two heterologous plant viruses in order to achieve a system that readily infects a wide range of plant types and yet poses little or no risk of infectious spread. An exemplary system has been described previously (see, e.g., PCT Publication WO 00/25574 and U.S. Patent Publication 2005/0026291, both of which are incorporated herein by reference). As noted herein, in particular aspects of the present invention, viral vectors are applied to plants (e.g., plant, portion of plant, sprout, etc.), for example, through infiltration or mechanical inoculation, spray, etc. Where infection is to be accomplished by direct application of a viral genome to a plant, any available technique may be used to prepare the genome. For example, many viruses that are usefully employed in accordance with the present invention have ssRNA genomes. ssRNA may be prepared by transcription of a DNA copy of the genome, or by replication of an RNA copy, either in vivo or in vitro. Given the readily availability of easy-to-use in vitro transcription systems (e.g., SP6, T7, reticulocyte lysate, etc.), and also the convenience of maintaining a DNA copy of an RNA vector, it is expected that inventive ssRNA vectors will often be prepared by in vitro transcription, particularly with T7 or SP6 polymerase.

[0114] In certain embodiments, rather than introducing a single viral vector type into a plant, multiple different viral vectors are introduced. Such vectors may, for example, trans-complement each other with respect to functions such as replication, cell-to-cell movement, and/or long distance movement. Vectors may contain different polynucleotides encoding Plasmodium antigen polypeptide in accordance with the invention. Selection for plant(s) or portions thereof that express multiple polypeptides encoding one or more Plasmodium antigen polypeptide(s) may be performed as described above for single polynucleotides or polypeptides.

### Plant Tissue Expression Systems

[0115] As discussed above, in accordance with the present invention, Plasmodium antigen polypeptides may be produced in any desirable system. Vector constructs and expression systems are well known in the art and may be adapted to incorporate use of Plasmodium antigen polypeptides provided herein. For example, transgenic plant production is known and generation of constructs and plant production may be adapted according to known techniques in the art. In some embodiments, transient expression systems in plants are desirable. Two of these systems include production of clonal roots and clonal plant systems, and derivatives thereof, as well as production of sprouted seedlings systems.

### Clonal Plants

[0116] Clonal roots maintain RNA viral expression vectors and stably produce target protein uniformly in an entire root over extended periods of time and multiple subcultures. In contrast to plants, where a target gene is eliminated via recombination during cell-to-cell or long distance movement, in root cultures the integrity of a viral vector is maintained and levels of target protein produced over time are similar to those observed during initial screening. Clonal roots allow for ease of production of heterologous protein material for oral formulation of antigen and vaccine compositions. Methods and reagents for generating a variety of clonal entities derived from plants which are useful for production of antigen (e.g., antigen proteins in accordance with the invention) have been described previously and are known in the art (see, for example, PCT Publication WO 05/81905; incorporated herein by reference). Clonal entities include clonal root lines, clonal root cell lines, clonal plant cell lines, and clonal plants capable of production of antigen (e.g., antigen proteins in accordance with the invention). The invention further provides methods and reagents for expression of antigen polynucleotide and polypeptide products in clonal cell lines derived from various plant tissues (e.g., roots, leaves), and in whole plants derived from single cells (clonal plants). Such methods are typically based on use of plant viral vectors of various types.

[0117] For example, in one aspect, the invention provides methods of obtaining a clonal root line that expresses a polynucleotide encoding a Plasmodium antigen polypeptide in accordance with the invention comprising steps of: (i) introducing a viral vector that comprises a polynucleotide encoding a Plasmodium antigen polypeptide in accordance with the invention into a plant or portion thereof; and (ii) generating one or more clonal root lines from a plant. Clonal root lines may be generated, for example, by infecting a plant or plant portion (e.g., a harvested piece of leaf) with an Agrobacterium (e.g., A. rhizogenes) that causes formation of hairy roots. Clonal root lines can be screened in various ways to identify lines that maintain virus, lines that express a polynucleotide encoding a Plasmodium antigen polypeptide in accordance with the invention at high levels, etc. The invention further provides clonal root lines, e.g., clonal root lines produced according to inventive methods, and further encompasses methods of expressing polynucleotides and producing polypeptide(s) encoding Plasmodium antigen polypeptide(s) in accordance with the invention using clonal root lines.

[0118] The invention further provides methods of generating a clonal root cell line that expresses a polynucleotide encoding a Plasmodium antigen polypeptide in accordance with the invention comprising steps of: (i) generating a clonal root line, cells of which contain a viral vector whose genome comprises a polynucleotide encoding a Plasmodium antigen polypeptide in accordance with the invention; (ii) releasing individual cells from a clonal root line; and (iii) maintaining cells under conditions suitable for root cell proliferation. The invention provides clonal root cell lines and methods of expressing polynucleotides and producing polypeptides using clonal root cell lines.

[0119] In one aspect, the invention provides methods of generating a clonal plant cell line that expresses a polynucleotide encoding a Plasmodium antigen polypeptide in accordance with the invention comprising steps of: (i) generating a clonal root line, cells of which contain a viral vector whose genome comprises a polynucleotide encoding a Plasmodium antigen polypeptide in accordance with the invention; (ii) releasing individual cells from a clonal root line; and (iii) maintaining cells in culture under conditions appropriate for plant cell proliferation. The invention further provides methods of generating a clonal plant cell line that expresses a polynucleotide encoding a Plasmodium antigen polypeptide in accordance with the invention comprising steps of: (i) introducing a viral vector that comprises a polynucleotide encoding a Plasmodium antigen polypeptide in accordance with the invention into cells of a plant cell line maintained in culture; and (ii) enriching for cells that contain viral vector. Enrichment may be performed, for example, by (i) removing a portion of cells from the culture; (ii) diluting removed cells so as to reduce cell concentration; (iii) allowing diluted cells to proliferate; and (iv) screening for cells that contain viral vector. Clonal plant cell lines may be used for production of a Plasmodium antigen polypeptide in accordance with the present invention.

[0120] The invention includes a number of methods for generating clonal plants, cells of which contain a viral vector that comprises a polynucleotide encoding a Plasmodium antigen polypeptide in accordance with the invention. For example, the invention provides methods of generating a clonal plant that expresses a polynucleotide encoding a Plasmodium antigen polypeptide in accordance with the invention comprising steps of: (i) generating a clonal root line, cells of which contain a viral vector whose genome comprises a polynucleotide encoding a Plasmodium antigen polypeptide in accordance with the invention; (ii) releasing individual cells from a clonal root line; and (iii) maintaining released cells under conditions appropriate for formation of a plant. The invention further provides methods of generating a clonal plant that expresses a polynucleotide encoding a Plasmodium antigen polypeptide in accordance with the invention comprising steps of: (i) generating a clonal plant cell line, cells of which contain a viral vector whose genome comprises a polynucleotide encoding a Plasmodium antigen polypeptide in accordance with the invention; and (ii) maintaining cells under conditions appropriate for formation of a plant. In general, clonal plants according to the invention can express any polynucleotide encoding a Plasmodium antigen polypeptide in accordance with the invention. Such clonal plants can be used for production of an antigen polypeptide.

[0121] As noted above, the present invention provides systems for expressing a polynucleotide or polynucleotide(s) encoding Plasmodium antigen polypeptide(s) in accordance with the invention in clonal root lines, clonal root cell lines, clonal plant cell lines (e.g., cell lines derived from leaf, stem, etc.), and in clonal plants. A polynucleotide encoding a Plasmodium antigen polypeptide in accordance with the invention is introduced into an ancestral plant cell using a plant viral vector whose genome includes polynucleotide encoding a Plasmodium antigen polypeptide in accordance with the invention operably linked to (i.e., under control of) a promoter. A clonal root line or clonal plant cell line is established from a cell containing virus according to any of several techniques further described below. The plant virus vector or portions thereof can be introduced into a plant cell by infection, by inoculation with a viral transcript or infectious cDNA clone, by electroporation, by T-DNA mediated gene transfer, etc.

[0122] The following sections describe methods for generating clonal root lines, clonal root cell lines, clonal plant cell lines, and clonal plants that express a polynucleotide encoding a Plasmodium antigen polypeptide in accordance with the invention are then described. A “root line” is distinguished from a “root cell line” in that a root line produces actual rootlike structures or roots while a root cell line consists of root cells that do not form rootlike structures. Use of the term “line” is intended to indicate that cells of the line can proliferate and pass genetic information on to progeny cells. Cells of a cell line typically proliferate in culture without being part of an organized structure such as those found in an intact plant. Use of the term “root line” is intended to indicate that cells in the root structure can proliferate without being part of a complete plant. It is noted that the term “plant cell” encompasses root cells. However, to distinguish the inventive methods for generating root lines and root cell lines from those used to directly generate plant cell lines from non-root tissue (as opposed to generating clonal plant cell lines from clonal root lines or clonal plants derived from clonal root lines), the terms “plant cell” and “plant cell line” as used herein generally refer to cells and cell lines that consist of non-root plant tissue. Plant cells can be, for example, leaf, stem, shoot, flower part, etc. It is noted that seeds can be derived from clonal plants generated as derived herein. Such seeds may contain viral vector as will plants obtained from such seeds. Methods for obtaining seed stocks are well known in the art (see, for example, U.S. Patent Publication 2004/093643; incorporated herein by reference).

### Clonal Root Lines

[0123] The present invention provides systems for generating a clonal root line in which a plant viral vector is used to direct expression of a polynucleotide encoding a Plasmodium antigen polypeptide in accordance with the invention. One or more viral expression vector(s) including a polynucleotide encoding a Plasmodium antigen polypeptide in accordance with the invention operably linked to a promoter is introduced into a plant or a portion thereof according to any of a variety of known methods. For example, plant leaves can be inoculated with viral transcripts. Vectors themselves may be directly applied to plants (e.g., via abrasive inoculations, mechanized spray inoculations, vacuum infiltration, particle bombardment, or electroporation). Alternatively or additionally, virions may be prepared (e.g., from already infected plants), and may be applied to other plants according to known techniques.

[0124] Where infection is to be accomplished by direct application of a viral genome to a plant, any available technique may be used to prepare viral genome. For example, many viruses that are usefully employed in accordance with the present invention have ssRNA genomes. ssRNA may be prepared by transcription of a DNA copy of the genome, or by replication of an RNA copy, either in vivo or in vitro. Given the readily available, easy-to-use in vitro transcription systems (e.g., SP6, T7, reticulocyte lysate, etc.), and also the convenience of maintaining a DNA copy of an RNA vector, it is expected that inventive ssRNA vectors will often be prepared by in vitro transcription, particularly with T7 or SP6 polymerase. Infectious cDNA clones can be used. Agrobacterially mediated gene transfer can be used to transfer viral nucleic acids such as viral vectors (either entire viral genomes or portions thereof) to plant cells using, e.g., agroinfiltration, according to methods known in the art.

[0125] A plant or plant portion may then be then maintained (e.g., cultured or grown) under conditions suitable for replication of viral transcript. In certain embodiments, virus spreads beyond the initially inoculated cell, e.g., locally from cell to cell and/or systemically from an initially inoculated leaf into additional leaves. However, in some embodiments, virus does not spread. Thus viral vector may contain genes encoding functional MP and/or CP, but may be lacking one or both of such genes. In general, viral vector is introduced into (infects) multiple cells in the plant or portion thereof.

[0126] Following introduction of viral vector into a plant, leaves are harvested. In general, leaves may be harvested at any time following introduction of a viral vector. However, it may be desirable to maintain a plant for a period of time following introduction of a viral vector into the plant, e.g., a period of time sufficient for viral replication and, optionally, spread of virus from the cells into which it was initially introduced. A clonal root culture (or multiple cultures) is prepared, e.g., by known methods further described below.

[0127] In general, any available method may be used to prepare a clonal root culture from a plant or plant tissue into which a viral vector has been introduced. One such method employs genes that exist in certain bacterial plasmids. These plasmids are found in various species of Agrobacterium that infect and transfer DNA to a wide variety of organisms. As a genus, Agrobacteria can transfer DNA to a large and diverse set of plant types including numerous dicot and monocot angiosperm species and gymnosperms (see, for example, Gelvin, 2003, Microbiol. Mol. Biol. Rev., 67:16, and references therein, all of which are incorporated herein by reference). The molecular basis of genetic transformation of plant cells is transfer from bacterium and integration into plant nuclear genome of a region of a large tumor-inducing (Ti) or rhizogenic (Ri) plasmid that resides within various Agrobacterial species. This region is referred to as the T-region when present in the plasmid and as T-DNA when excised from plasmid. Generally, a single-stranded T-DNA molecule is transferred to a plant cell in naturally occurring Agrobacterial infection and is ultimately incorporated (in double-stranded form) into the genome. Systems based on Ti plasmids are widely used for introduction of foreign genetic material into plants and for production of transgenic plants.

[0128] Infection of plants with various Agrobacterial species and transfer of T-DNA has a number of effects. For example, A. tumefaciens causes crown gall disease while A. rhizogenes causes development of hairy roots at the site of infection, a condition known as “hairy root disease.” Each root arises from a single genetically transformed cell. Thus root cells in roots are clonal, and each root represents a clonal population of cells. Roots produced by A. rhizogenes infection are characterized by a high growth rate and genetic stability (Giri et al., 2000, Biotech. Adv., 18:1, and references therein, all of which are incorporated herein by reference). In addition, such roots are able to regenerate genetically stable plants (Giri 2000, supra).

[0129] In general, the present invention encompasses use of any strain of Agrobacteria, particularly any A. rhizogenes strain, that is capable of inducing formation of roots from plant cells. As mentioned above, a portion of the Ri plasmid (Ri T-DNA) is responsible for causing hairy root disease. While transfer of this portion of the Ri plasmid to plant cells can conveniently be accomplished by infection with Agrobacteria harboring the Ri plasmid, the invention encompasses use of alternative methods of introducing the relevant region into a plant cell. Such methods include any available method of introducing genetic material into plant cells including, but not limited to, biolistics, electroporation, PEG-mediated DNA uptake, Ti-based vectors, etc. The relevant portions of Ri T-DNA can be introduced into plant cells by use of a viral vector. Ri genes can be included in the same vector that contains a polynucleotide encoding a Plasmodium antigen polypeptide in accordance with the invention or in a different viral vector, which can be the same or a different type to that of the vector that contains a polynucleotide encoding a Plasmodium antigen polypeptide in accordance with the invention. It is noted that the entire Ri T-DNA may not be required for production of hairy roots, and the invention encompasses use of portions of Ri T-DNA, provided that such portions contain sufficient genetic material to induce root formation, as known in the art. Additional genetic material, e.g., genes present within the Ri plasmid but not within T-DNA, may be transferred to a plant cell in accordance with the invention, particularly genes whose expression products facilitate integration of T-DNA into the plant cell DNA.

[0130] In order to prepare a clonal root line in accordance with certain embodiments, harvested leaf portions are contacted with A. rhizogenes under conditions suitable for infection and transformation. Leaf portions are maintained in culture to allow development of hairy roots. Each root is clonal, i.e., cells in the root are derived from a single ancestral cell into which Ri T-DNA was transferred. In accordance with the invention, a portion of such ancestral cells will contain a viral vector. Thus cells in a root derived from such an ancestral cell may contain viral vector since it will be replicated and will be transmitted during cell division. Thus a high proportion (e.g. at least 50%, at least 75%, at least 80%, at least 90%, at least 95%), all (100%), or substantially all (at least 98%) of cells will contain viral vector. It is noted that since viral vector is inherited by daughter cells within the clonal root, movement of viral vector within the root is not necessary to maintain viral vector throughout the root. Individual clonal hairy roots may be removed from the leaf portion and further cultured. Such roots are also referred to herein as root lines. Isolated clonal roots continue to grow following isolation.

[0131] Root lines may be cultured on a large scale for production of antigen in accordance with the invention polypeptides as discussed further below. It is noted that clonal root lines (and cell lines derived from clonal root lines) can generally be maintained in medium that does not include various compounds, e.g., plant growth hormones such as auxins, cytokinins, etc., that are typically employed in culture of root and plant cells. This feature greatly reduces expense associated with tissue culture, and the inventors expect that it will contribute significantly to economic feasibility of protein production using plants.

[0132] Any of a variety of methods may be used to select clonal roots that express a polynucleotide encoding Plasmodium antigen polypeptide(s) in accordance with the invention. Western blots, ELISA assays, etc., can be used to detect an encoded polypeptide. In the case of detectable markers such as GFP, alternative methods such as visual screens can be performed. If a viral vector that contains a polynucleotide that encodes a selectable marker is used, an appropriate selection can be imposed (e.g., leaf material and/or roots derived therefrom can be cultured in the presence of an appropriate antibiotic or nutritional condition and surviving roots identified and isolated). Certain viral vectors contain two or more polynucleotide(s) encoding Plasmodium antigen polypeptide(s) in accordance with the invention, e.g., two or more polynucleotides encoding different polypeptides. If one of these is a selectable or detectable marker, clonal roots that are selected or detected by selecting for or detecting expression of the marker will have a high probability of also expressing a second polynucleotide. Screening for root lines that contain particular polynucleotides can also be performed using PCR and other nucleic acid detection methods.

[0133] Alternatively or additionally, clonal root lines can be screened for presence of virus by inoculating host plants that will form local lesions as a result of virus infection (e.g., hypersensitive host plants). For example, 5 mg of root tissue can be homogenized in 50 μl of phosphate buffer and used to inoculate a single leaf of a tobacco plant. If virus is present in root cultures, within two to three days characteristic lesions will appear on infected leaves. This means that root line contains recombinant virus that carries a polynucleotide encoding a Plasmodium antigen polypeptide in accordance with the invention. If no local lesions are formed, there is no virus, and the root line is rejected as negative. This method is highly time and cost efficient. After initially screening for the presence of virus, roots that contain virus may be subjected to secondary screening, e.g., by Western blot or ELISA to select high expressers. Additional screens, e.g., screens for rapid growth, growth in particular media or under particular environmental conditions, etc., can be applied. These screening methods may, in general, be applied in the development of any of clonal root lines, clonal root cell lines, clonal plant cell lines, and/or clonal plants described herein.

[0134] As will be evident to one of ordinary skill in the art, a variety of modifications may be made to the description of the inventive methods for generating clonal root lines that contain a viral vector. Such modifications are within the scope of the invention. For example, while it is generally desirable to introduce viral vector into an intact plant or portion thereof prior to introduction of Ri T-DNA genes, in certain embodiments, the Ri-DNA is introduced prior to introducing viral vector. In addition, it is possible to contact intact plants with A. rhizogenes rather than harvesting leaf portions and then exposing them to bacterium.

[0135] Other methods of generating clonal root lines from single cells of a plant or portion thereof that harbor a viral vector can be used (i.e., methods not using A. rhizogenes or genetic material from the Ri plasmid). For example, treatment with certain plant hormones or combinations of plant hormones is known to result in generation of roots from plant tissue.

Clonal Cell Lines Derived from Clonal Root Lines

[0136] As described above, the invention provides methods for generating clonal root lines, wherein cells in root lines contain a viral vector. As is well known in the art, a variety of different cell lines can be generated from roots. For example, root cell lines can be generated from individual root cells obtained from a root using a variety of known methods. Such root cell lines may be obtained from various different root cell types within the root. In general, root material is harvested and dissociated (e.g., physically and/or enzymatically digested) to release individual root cells, which are then further cultured. Complete protoplast formation is generally not necessary. If desired, root cells can be plated at very dilute cell concentrations, so as to obtain root cell lines from single root cells. Root cell lines derived in this manner are clonal root cell lines containing viral vector. Such root cell lines therefore exhibit stable expression of a polynucleotide encoding a Plasmodium antigen polypeptide in accordance with the invention. Clonal plant cell lines can be obtained in a similar manner from clonal roots, e.g., by culturing dissociated root cells in the presence of appropriate plant hormones. Screens and successive rounds of enrichment can be used to identify cell lines that express a polynucleotide encoding a Plasmodium antigen polypeptide in accordance with the invention at high levels. However, if the clonal root line from which the cell line is derived already expresses at high levels, such additional screens may be unnecessary.

[0137] As in the case of the clonal root lines, cells of a clonal root cell line are derived from a single ancestral cell that contains viral vector and will, therefore, also contain viral vector since it will be replicated and will be transmitted during cell division. Thus a high proportion (e.g. at least 50%, at least 75%, at least 80%, at least 90%, at least 95%), all (100%), or substantially all (at least 98%) of cells will contain viral vector. It is noted that since viral vector is inherited by daughter cells within a clonal root cell line, movement of viral vector among cells is not necessary to maintain viral vector. Clonal root cell lines can be used for production of a polynucleotide encoding a Plasmodium antigen polypeptide in accordance with the invention as described below.

### Clonal Plant Cell Lines

[0138] The present invention provides methods for generating a clonal plant cell line in which a plant viral vector is used to direct expression of a polynucleotide encoding a Plasmodium antigen polypeptide in accordance with the invention. According to the inventive method, one or more viral expression vector(s) including a polynucleotide encoding a Plasmodium antigen polypeptide in accordance with the invention operably linked to a promoter is introduced into cells of a plant cell line that is maintained in cell culture. A number of plant cell lines from various plant types are known in the art, any of which can be used. Newly derived cell lines can be generated according to known methods for use in practicing the invention. A viral vector is introduced into cells of a plant cell line according to any of a number of methods. For example, protoplasts can be made and viral transcripts then electroporated into cells. Other methods of introducing a plant viral vector into cells of a plant cell line can be used.

[0139] A method for generating clonal plant cell lines in accordance with the invention and a viral vector suitable for introduction into plant cells (e.g., protoplasts) can be used as follows: Following introduction of viral vector, a plant cell line may be maintained in tissue culture. During this time viral vector may replicate, and polynucleotide(s) encoding a Plasmodium antigen polypeptide(s) in accordance with the invention may be expressed. Clonal plant cell lines are derived from culture, e.g., by a process of successive enrichment. For example, samples may be removed from culture, optionally with dilution so that the concentration of cells is low, and plated in Petri dishes in individual droplets. Droplets are then maintained to allow cell division.

[0140] It will be appreciated that droplets may contain a variable number of cells, depending on the initial density of the culture and the amount of dilution. Cells can be diluted such that most droplets contain either 0 or 1 cell if it is desired to obtain clonal cell lines expressing a polynucleotide encoding a Plasmodium antigen polypeptide in accordance with the invention after only a single round of enrichment. However, it can be more efficient to select a concentration such that multiple cells are present in each droplet and then screen droplets to identify those that contain expressing cells. In general, any appropriate screening procedure can be employed. For example, selection or detection of a detectable marker such as GFP can be used. Western blots or ELISA assays can be used. Individual droplets (100 μl) contain more than enough cells for performance of these assays. Multiple rounds of enrichment are performed to isolate successively higher expressing cell lines. Single clonal plant cell lines (i.e., populations derived from a single ancestral cell) can be generated by further limiting dilution using standard methods for single cell cloning. However, it is not necessary to isolate individual clonal lines. A population containing multiple clonal cell lines can be used for expression of a polynucleotide encoding one or more Plasmodium antigen polypeptide(s) in accordance with the invention.

[0141] In general, certain considerations described above for generation of clonal root lines apply to the generation of clonal plant cell lines. For example, a diversity of viral vectors containing one or more polynucleotide(s) encoding a Plasmodium antigen polypeptide(s) in accordance with the invention can be used as can combinations of multiple different vectors. Similar screening methods can be used. As in the case of clonal root lines and clonal root cell lines, cells of a clonal plant cell line are derived from a single ancestral cell that contains viral vector and will, therefore, also contain viral vector since it will be replicated and will be transmitted during cell division. Thus a high proportion (e.g. at least 50%, at least 75%, at least 80%, at least 90%, at least 95%), all (100%), or substantially all (at least 98%) of cells will contain viral vector. It is noted that since viral vector is inherited by daughter cells within a clonal plant cell line, movement of viral vector among cells is not necessary to maintain viral vector. The clonal plant cell line can be used for production of a polypeptide encoding a Plasmodium antigen polypeptide in accordance with the invention as described below.

### Clonal Plants

[0142] Clonal plants can be generated from clonal roots, clonal root cell lines, and/or clonal plant cell lines produced according to various methods described above. Methods for the generation of plants from roots, root cell lines, and plant cell lines such as clonal root lines, clonal root cell lines, and clonal plant cell lines described herein are well known in the art (see, e.g., Peres et al., 2001, Plant Cell, Tissue, Organ Culture, 65:37; incorporated herein by reference; and standard reference works on plant molecular biology and biotechnology cited elsewhere herein). The invention therefore provides a method of generating a clonal plant comprising steps of (i) generating a clonal root line, clonal root cell line, or clonal plant cell line according to any of the inventive methods described above; and (ii) generating a whole plant from a clonal root line, clonal root cell line, or clonal plant. Clonal plants may be propagated and grown according to standard methods.

[0143] As in the case of clonal root lines, clonal root cell lines, and clonal plant cell lines, cells of a clonal plant are derived from a single ancestral cell that contains viral vector and will, therefore, also contain viral vector since it will be replicated and will be transmitted during cell division. Thus a high proportion (e.g. at least 50%, at least 75%, at least 80%, at least 90%, at least 95%), all (100%), or substantially all (at least 98%) of cells will contain viral vector. It is noted that since viral vector is inherited by daughter cells within the clonal plant, movement of viral vector is not necessary to maintain viral vector.

### Sprouts and Sprouted Seedling Plant Expression Systems

[0144] According to the present invention, any of a variety of different systems can be used to express proteins or polypeptides in young plants (e.g., sprouted seedlings). In some embodiments, transgenic cell lines or seeds are generated, which are then sprouted and grown for a period of time so that a protein or polypeptide included in the transgenic sequences is produced in young plant tissues (e.g., in sprouted seedlings). Typical technologies for the production of transgenic plant cells and/or seeds include Agrobacterium tumefaciens mediated gene transfer and microprojectile bombardment or electroporation.

[0145] Systems and reagents for generating a variety of sprouts and sprouted seedlings which are useful for production of Plasmodium antigen polypeptide(s) according to the present invention have been described previously and are known in the art (see, for example, PCT Publication WO 04/43886; incorporated herein by reference). The present invention further provides sprouted seedlings, which may be edible, as a biomass containing a Plasmodium antigen polypeptide. In certain aspects, biomass is provided directly for consumption of antigen containing compositions. In some aspects, biomass is processed prior to consumption, for example, by homogenizing, crushing, drying, or extracting. In certain aspects, Plasmodium antigen polypeptides are purified from biomass and formulated into a pharmaceutical composition.

[0146] Additionally provided are methods for producing Plasmodium antigen polypeptide(s) in sprouted seedlings that can be consumed or harvested live (e.g., sprouts, sprouted seedlings of the Brassica genus). In certain aspects, the present invention involves growing a seed to an edible sprouted seedling in a contained, regulatable environment (e.g., indoors, in a container, etc.). A seed can be a genetically engineered seed that contains an expression cassette encoding a Plasmodium antigen polypeptide, which expression is driven by an exogenously inducible promoter. A variety of exogenously inducible promoters can be used that are inducible, for example, by light, heat, phytohormones, nutrients, etc.

[0147] In related embodiments, the present invention provides methods of producing Plasmodium antigen polypeptide(s) in sprouted seedlings by first generating a seed stock for a sprouted seedling by transforming plants with an expression cassette that encodes Plasmodium antigen polypeptide using an Agrobacterium transformation system, wherein expression of a Plasmodium antigen polypeptide is driven by an inducible promoter. Transgenic seeds can be obtained from a transformed plant, grown in a contained, regulatable environment, and induced to express a Plasmodium antigen polypeptide.

[0148] In some embodiments methods are provided that involves infecting sprouted seedlings with a viral expression cassette encoding a Plasmodium antigen polypeptide, expression of which may be driven by any of a viral promoter or an inducible promoter. Sprouted seedlings are grown for two to fourteen days in a contained, regulatable environment or at least until sufficient levels of Plasmodium antigen polypeptide have been obtained for consumption or harvesting.

[0149] The present invention further provides systems for producing Plasmodium antigen polypeptide(s) in sprouted seedlings that include a housing unit with climate control and a sprouted seedling containing an expression cassette that encodes one or more Plasmodium antigen polypeptides, wherein expression is driven by a constitutive or inducible promoter. Systems can provide unique advantages over the outdoor environment or greenhouse, which cannot be controlled. Thus, the present invention enables a grower to precisely time the induction of expression of Plasmodium antigen polypeptide. It can greatly reduce time and cost of producing Plasmodium antigen polypeptide(s).

[0150] In certain aspects, transiently transfected sprouts contain viral vector sequences encoding an inventive Plasmodium antigen polypeptide. Seedlings are grown for a time period so as to allow for production of viral nucleic acid in sprouts, followed by a period of growth wherein multiple copies of virus are produced, thereby resulting in production of Plasmodium antigen polypeptide(s).

[0151] In certain aspects, genetically engineered seeds or embryos that contain a nucleic acid encoding Plasmodium antigen polypeptide(s) are grown to sprouted seedling stage in a contained, regulatable environment. The contained, regulatable environment may be a housing unit or room in which seeds can be grown indoors. All environmental factors of a contained, regulatable environment may be controlled. Since sprouts do not require light to grow, and lighting can be expensive, genetically engineered seeds or embryos may be grown to sprouted seedling stage indoors in the absence of light.

[0152] Other environmental factors that can be regulated in a contained, regulatable environment of the present invention include temperature, humidity, water, nutrients, gas (e.g., O₂ or CO₂ content or air circulation), chemicals (small molecules such as sugars and sugar derivatives or hormones such as such as phytohormones gibberellic or absisic acid, etc.) and the like.

[0153] According to certain methods of the present invention, expression of a nucleic acid encoding a Plasmodium antigen polypeptide may be controlled by an exogenously inducible promoter. Exogenously inducible promoters are caused to increase or decrease expression of a nucleic acid in response to an external, rather than an internal stimulus. A number of environmental factors can act as inducers for expression of nucleic acids carried by expression cassettes of genetically engineered sprouts. A promoter may be a heat-inducible promoter, such as a heat-shock promoter. For example, using as heat-shock promoter, temperature of a contained environment may simply be raised to induce expression of a nucleic acid. Other promoters include light inducible promoters. Light-inducible promoters can be maintained as constitutive promoters if light in a contained regulatable environment is always on. Alternatively or additionally, expression of a nucleic acid can be turned on at a particular time during development by simply turning on the light. A promoter may be a chemically inducible promoter is used to induce expression of a nucleic acid. According to these embodiments, a chemical could simply be misted or sprayed onto seed, embryo, or seedling to induce expression of nucleic acid. Spraying and misting can be precisely controlled and directed onto target seed, embryo, or seedling to which it is intended. The contained environment is devoid of wind or air currents, which could disperse chemical away from intended target, so that the chemical stays on the target for which it was intended.

[0154] According to the present invention, time of expression is induced can be selected to maximize expression of a Plasmodium antigen polypeptide in sprouted seedling by the time of harvest. Inducing expression in an embryo at a particular stage of growth, for example, inducing expression in an embryo at a particular number of days after germination, may result in maximum synthesis of a Plasmodium antigen polypeptide at the time of harvest. For example, inducing expression from the promoter 4 days after germination may result in more protein synthesis than inducing expression from the promoter after 3 days or after 5 days. Those skilled in the art will appreciate that maximizing expression can be achieved by routine experimentation. In certain methods, sprouted seedlings are harvested at about 1 day, 2 days, 3 days, 4 days, 5 days, 6 days, 7 days, 8 days, 9 days, 10 days, 11 days, or 12 days, after germination.

[0155] In cases where the expression vector has a constitutive promoter instead of an inducible promoter, sprouted seedling may be harvested at a certain time after transformation of sprouted seedling. For example, if a sprouted seedling were virally transformed at an early stage of development, for example, at embryo stage, sprouted seedlings may be harvested at a time when expression is at its maximum post-transformation, e.g., at up to about 1 day, up to about 2 days, up to about 3 days, up to about 4 days, up to about 5 days, up to about 6 days, up to about 7 days, up to about 8 days, up to about 9 days, up to about 10 days, up to about 11 days, up to about 12 days, up to about 13 days, up to about 14 days, up to about 15 days, up to about 16 days, up to about 17 days, up to about 18 days, up to about 19 days, up to about 20 days, up to about 21 days, up to about 22 days, up to about 23 days, up to about 24 days, up to about 25 days, up to about 26 days, up to about 27 days, up to about 28 days, up to about 29 days, up to about 30 days post-transformation. It could be that sprouts develop one, two, three or more months post-transformation, depending on germination of seed.

[0156] Generally, once expression of Plasmodium antigen polypeptide(s) begins, seeds, embryos, or sprouted seedlings are allowed to grow until sufficient levels of Plasmodium antigen polypeptide(s) are expressed. In certain aspects, sufficient levels are levels that would provide a therapeutic benefit to a subject if harvested biomass were eaten raw. Alternatively or additionally, sufficient levels are levels from which Plasmodium antigen polypeptide can be concentrated or purified from biomass and formulated into a pharmaceutical composition that provides a therapeutic benefit to a subject upon administration. Typically, Plasmodium antigen polypeptide is not a protein expressed in sprouted seedling in nature. At any rate, Plasmodium antigen polypeptide is typically expressed at concentrations above that which would be present in the sprouted seedling in nature.

[0157] Once expression of Plasmodium antigen polypeptide is induced, growth is allowed to continue until sprouted seedling stage, at which time sprouted seedlings are harvested. Sprouted seedlings can be harvested live. Harvesting live sprouted seedlings has several advantages including minimal effort and breakage. Sprouted seedlings of the present invention may be grown hydroponically, making harvesting a simple matter of lifting a sprouted seedling from its hydroponic solution. No soil is required for growth of sprouted seedlings in accordance with the invention, but may be provided if deemed necessary or desirable by the skilled artisan. Because sprouts can be grown without soil, no cleansing of sprouted seedling material is required at the time of harvest. Being able to harvest the sprouted seedling directly from its hydroponic environment without washing or scrubbing minimizes breakage of harvested material. Breakage and wilting of plants induces apoptosis. During apoptosis, certain proteolytic enzymes become active, which can degrade pharmaceutical protein expressed in the sprouted seedling, resulting in decreased therapeutic activity of the protein. Apoptosis-induced proteolysis can significantly decrease yield of protein from mature plants. Using methods of the present invention, apoptosis may be avoided when no harvesting takes place until the moment proteins are extracted from the plant.

[0158] For example, live sprouts may be ground, crushed, or blended to produce a slurry of sprouted seedling biomass, in a buffer containing protease inhibitors. Buffer may be maintained at about 4° C. In some aspects, sprouted seedling biomass is air-dried, spray dried, frozen, or freeze-dried. As in mature plants, some of these methods, such as air-drying, may result in a loss of activity of pharmaceutical protein. However, because sprouted seedlings are very small and have a large surface area to volume ratio, this is much less likely to occur. Those skilled in the art will appreciate that many techniques for harvesting biomass that minimize proteolysis of expressed protein are available and could be applied to the present invention.

[0159] In some embodiments, sprouted seedlings are edible. In certain embodiments, sprouted seedlings expressing sufficient levels of Plasmodium antigen polypeptides are consumed upon harvesting (e.g., immediately after harvest, within minimal period following harvest) so that absolutely no processing occurs before sprouted seedlings are consumed. In this way, any harvest-induced proteolytic breakdown of Plasmodium antigen polypeptide before administration of Plasmodium antigen polypeptide to a subject in need of treatment is minimized. For example, sprouted seedlings that are ready to be consumed can be delivered directly to a subject. Alternatively or additionally, genetically engineered seeds or embryos are delivered to a subject in need of treatment and grown to sprouted seedling stage by a subject. In one aspect, a supply of genetically engineered sprouted seedlings is provided to a subject, or to a doctor who will be treating subjects, so that a continual stock of sprouted seedlings expressing certain desirable Plasmodium antigen polypeptides may be cultivated. This may be particularly valuable for populations in developing countries, where expensive pharmaceuticals are not affordable or deliverable. The ease with which sprouted seedlings in accordance with the invention can be grown makes sprouted seedlings of the present invention particularly desirable for such developing populations.

[0160] The regulatable nature of the contained environment imparts advantages to the present invention over growing plants in the outdoor environment. In general, growing genetically engineered sprouted seedlings that express pharmaceutical proteins in plants provides a pharmaceutical product faster (because plants are harvested younger) and with less effort, risk, and regulatory considerations than growing genetically engineered plants. The contained, regulatable environment used in the present invention reduces or eliminates risk of cross-pollinating plants in nature.

[0161] For example, a heat inducible promoter likely would not be used outdoors because outdoor temperature cannot be controlled. The promoter would be turned on any time the outdoor temperature rose above a certain level. Similarly, the promoter would be turned off every time the outdoor temperature dropped. Such temperature shifts could occur in a single day, for example, turning expression on in the daytime and off at night. A heat inducible promoter, such as those described herein, would not even be practical for use in a greenhouse, which is susceptible to climatic shifts to almost the same degree as outdoors. Growth of genetically engineered plants in a greenhouse is quite costly. In contrast, in the present system, every variable can be controlled so that the maximum amount of expression can be achieved with every harvest.

[0162] In certain embodiments, sprouted seedlings of the present invention are grown in trays that can be watered, sprayed, or misted at any time during development of sprouted seedling. For example, a tray may be fitted with one or more watering, spraying, misting, and draining apparatus that can deliver and/or remove water, nutrients, chemicals etc. at specific time and at precise quantities during development of the sprouted seedling. For example, seeds require sufficient moisture to keep them damp. Excess moisture drains through holes in trays into drains in the floor of the room. Typically, drainage water is treated as appropriate for removal of harmful chemicals before discharge back into the environment.

[0163] Another advantage of trays is that they can be contained within a very small space. Since no light is required for sprouted seedlings to grow, trays containing seeds, embryos, or sprouted seedlings may be tightly stacked vertically on top of one another, providing a large quantity of biomass per unit floor space in a housing facility constructed specifically for these purposes. In addition, stacks of trays can be arranged in horizontal rows within the housing unit. Once seedlings have grown to a stage appropriate for harvest (about two to fourteen days) individual seedling trays are moved into a processing facility, either manually or by automatic means, such as a conveyor belt.

[0164] The system of the present invention is unique in that it provides a sprouted seedling biomass, which is a source of a Plasmodium antigen polypeptide(s). Whether consumed directly or processed into the form of a pharmaceutical composition, because sprouted seedlings are grown in a contained, regulatable environment, sprouted seedling biomass and/or pharmaceutical composition derived from biomass can be provided to a consumer at low cost. In addition, the fact that the conditions for growth of sprouted seedlings can be controlled makes the quality and purity of product consistent. The contained, regulatable environment in accordance with the invention obviates many safety regulations of the EPA that can prevent scientists from growing genetically engineered agricultural products out of doors.

### Transformed Sprouts

[0165] A variety of methods can be used to transform plant cells and produce genetically engineered sprouted seedlings. Two available methods for transformation of plants that require that transgenic plant cell lines be generated in vitro, followed by regeneration of cell lines into whole plants include Agrobacterium tumefaciens mediated gene transfer and microprojectile bombardment or electroporation. In some embodiments, transient expression systems are utilized. Typical technologies for producing transient expression of proteins or polypeptides in plant tissues utilize plant viruses. Viral transformation provides more rapid and less costly methods of transforming embryos and sprouted seedlings that can be harvested without an experimental or generational lag prior to obtaining the desired product. For any of these techniques, the skilled artisan would appreciate how to adjust and optimize transformation protocols that have traditionally been used for plants, seeds, embryos, or spouted seedlings.

[0166] The present invention provides expression systems having advantages of viral expression systems (e.g., rapid expression, high levels of production) and of Agrobacterium transformation (e.g., controlled administration). In particular, as discussed in detail below, the present invention provides systems in which an agrobacterial construct (i.e., a construct that replicates in Agrobacterium and therefore can be delivered to plant cells by delivery of Agrobacterium) includes a plant promoter that, after being introduced into a plant, directs expression of viral sequences (e.g., including viral replication sequences) carrying a gene for a protein or polypeptide of interest. This system allows controlled, high level transient expression of proteins or polypeptides in plants.

[0167] A variety of different embodiments of expression systems, some of which produce transgenic plants and others of which provide for transient expression, are discussed in further detail individually below. For any of these techniques, the skilled artisan reading the present specification would appreciate how to adjust and optimize protocols for expression of proteins or polypeptides in young plant tissues (e.g., sprouted seedlings).

### Agrobacterium Transformation

[0168] Agrobacterium is a representative genus of the gram-negative family Rhizobiaceae. This species is responsible for plant tumors such as crown gall and hairy root disease. In dedifferentiated plant tissue, which is characteristic of tumors, amino acid derivatives known as opines are produced by the plant and catabolized by the Agrobacterium. The bacterial genes responsible for expression of opines are a convenient source of control elements for chimeric expression cassettes. According to the present invention, an Agrobacterium transformation system may be used to generate young plants (e.g., sprouted seedlings, including edible sprouted seedlings), which are merely harvested earlier than mature plants. Agrobacterium transformation methods can easily be applied to regenerate sprouted seedlings expressing Plasmodium antigen polypeptides.

[0169] In general, transforming plants with Agrobacterium involves transformation of plant cells grown in tissue culture by co-cultivation with an Agrobacterium tumefaciens carrying a plant/bacterial vector. The vector contains a gene encoding a Plasmodium antigen polypeptide. The Agrobacterium transfers vector to plant host cell and is then eliminated using antibiotic treatment. Transformed plant cells expressing Plasmodium antigen polypeptide are selected, differentiated, and finally regenerated into complete plantlets (Hellens et al., 2000, Plant Mol. Biol., 42:819; Pilon-Smits et al., 1999, Plant Physiolog., 119:123; Barfield et al., 1991, Plant Cell Reports, 10:308; and Riva et al., 1998, J. Biotech., 1(3); all of which are incorporated by reference herein).

[0170] Agrobacterial expression vectors for use in the present invention include a gene (or expression cassette) encoding a Plasmodium antigen polypeptide designed for operation in plants, with companion sequences upstream and downstream of the expression cassette. Companion sequences are generally of plasmid or viral origin and provide necessary characteristics to the vector to transfer DNA from bacteria to the desired plant host.

[0171] The basic bacterial/plant vector construct may desirably provide a broad host range prokaryote replication origin, a prokaryote selectable marker. Suitable prokaryotic selectable markers include resistance toward antibiotics such as ampicillin or tetracycline. Other DNA sequences encoding additional functions that are well known in the art may be present in the vector.

[0172] Agrobacterium T-DNA sequences are required for Agrobacterium mediated transfer of DNA to the plant chromosome. The tumor-inducing genes of T-DNA are typically removed during construction of an agrobacterial expression construct and are replaced with sequences encoding a Plasmodium antigen polypeptide. T-DNA border sequences are retained because they initiate integration of the T-DNA region into the plant genome. If expression of Plasmodium antigen polypeptide is not readily amenable to detection, the bacterial/plant vector construct may include a selectable marker gene suitable for determining if a plant cell has been transformed, e.g., nptII kanamycin resistance gene. On the same or different bacterial/plant vector (Ti plasmid) are Ti sequences. Ti sequences include virulence genes, which encode a set of proteins responsible for excision, transfer and integration of T-DNA into the plant genome (Schell, 1987, Science, 237:1176-86; incorporated herein by reference). Other sequences suitable for permitting integration of heterologous sequence into the plant genome may include transposon sequences, and the like, for homologous recombination.

[0173] On the same or different bacterial/plant vector (Ti plasmid) are Ti sequences. Ti sequences include the virulence genes, which encode a set of proteins responsible for the excision, transfer and integration of the T-DNA into the plant genome (Schell, 1987, Science, 237:1176-83; incorporated herein by reference). Other sequences suitable for permitting integration of the heterologous sequence into the plant genome may also include transposon sequences, and the like, for homologous recombination.

[0174] Certain constructs will include an expression cassette encoding an antigen protein. One, two, or more expression cassettes may be used in a given transformation. The recombinant expression cassette contains, in addition to a Plasmodium antigen polypeptide encoding sequence, at least the following elements: a promoter region, plant 5′ untranslated sequences, initiation codon (depending upon whether or not an expressed gene has its own), and transcription and translation termination sequences. In addition, transcription and translation terminators may be included in expression cassettes or chimeric genes of the present invention. Signal secretion sequences that allow processing and translocation of a protein, as appropriate, may be included in the expression cassette.

[0175] A variety of promoters, signal sequences, and transcription and translation terminators are described, for example, in Lawton et al. (1987, Plant Mol. Biol., 9:315-24; incorporated herein by reference) or in U.S. Pat. No. 5,888,789 (incorporated herein by reference). In addition, structural genes for antibiotic resistance are commonly utilized as a selection factor (Fraley et al., 1983, Proc. Natl. Acad. Sci., USA, 80:4803-7; incorporated herein by reference). Unique restriction enzyme sites at the 5′ and 3′ ends of the cassette allow for easy insertion into a pre-existing vector.

[0176] Other binary vector systems for Agrobacterium-mediated transformation, carrying at least one T-DNA border sequence are described in PCT Publication WO 2000/020612 (incorporated herein by reference). Further discussion of Agrobacterium-mediated transformation is found in Gelvin (2003, Microbiol. Mol. Biol. Rev., 67:16-37; and references therein; all of which are incorporated herein by reference) and Lorence and Verpoorte (2004, Methods Mol. Biol., 267:329-50; incorporated herein by reference).

[0177] In certain embodiments, bacteria other than Agrobacteria are used to introduce a nucleic acid sequence into a plant. See, e.g., Broothaerts et al. (2005, Nature, 433:629-33; incorporated herein by reference).

[0178] Seeds are prepared from plants that have been infected with Agrobacteria (or other bacteria) such that the desired heterologous gene encoding a protein or polypeptide of interest is introduced. Such seeds are harvested, dried, cleaned, and tested for viability and for the presence and expression of a desired gene product. Once this has been determined, seed stock is typically stored under appropriate conditions of temperature, humidity, sanitation, and security to be used when necessary. Whole plants may then be regenerated from cultured protoplasts, e.g., as described in Evans et al. (Handbook of Plant Cell Cultures, Vol. 1, MacMillan Publishing Co., New York, N.Y., 1983; incorporated herein by reference); and in Vasil (ed., Cell Culture and Somatic Cell Genetics of Plants, Acad. Press, Orlando, Fla., Vol. I, 1984, and Vol. III, 1986; incorporated herein by reference). In certain aspects, plants are regenerated only to sprouted seedling stage. In some aspects, whole plants are regenerated to produce seed stocks and sprouted seedlings are generated from seeds of the seed stock.

[0179] In certain embodiments, the plants are not regenerated into adult plants. For example, in some embodiments, plants are regenerated only to the sprouted seedling stage. In other embodiments, whole plants are regenerated to produce seed stocks and young plants (e.g., sprouted seedlings) for use in accordance with the present invention are generated from the seeds of the seed stock.

[0180] All plants from which protoplasts can be isolated and cultured to give whole, regenerated plants can be transformed by Agrobacteria according to the present invention so that whole plants are recovered that contain a transferred gene. It is known that practically all plants can be regenerated from cultured cells or tissues, including, but not limited to, all major species of plants that produce edible sprouts. Some suitable plants include alfalfa, mung bean, radish, wheat, mustard, spinach, carrot, beet, onion, garlic, celery, rhubarb, a leafy plant such as cabbage or lettuce, watercress or cress, herbs such as parsley, mint, or clovers, cauliflower, broccoli, soybean, lentils, edible flowers such as sunflower etc.

[0181] Means for regeneration of plants from transformed cells vary from one species of plants to the next. However, those skilled in the art will appreciate that generally a suspension of transformed protoplants containing copies of a heterologous gene is first provided. Callus tissue is formed and shoots may be induced from callus and subsequently rooted. Alternatively or additionally, embryo formation can be induced from a protoplast suspension. These embryos germinate as natural embryos to form plants. Steeping seed in water or spraying seed with water to increase the moisture content of the seed to between 35%-45% initiates germination. For germination to proceed, seeds are typically maintained in air saturated with water under controlled temperature and airflow conditions. The culture media will generally contain various amino acids and hormones, such as auxin and cytokinins It is advantageous to add glutamic acid and proline to the medium, especially for such species as alfalfa. Shoots and roots normally develop simultaneously. Efficient regeneration will depend on the medium, the genotype, and the history of the culture. If these three variables are controlled, then regeneration is fully reproducible and repeatable.

[0182] Mature plants, grown from the transformed plant cells, are selfed and non-segregating, homozygous transgenic plants are identified. The inbred plant produces seeds containing inventive antigen-encoding sequences. Such seeds can be germinated and grown to sprouted seedling stage to produce Plasmodium antigen polypeptide(s) according to the present invention.

[0183] In related embodiments, transgenic seeds (e.g., carrying the transferred gene encoding a Plasmodium antigen polypeptide, typically integrated into the genome) may be formed into seed products and sold with instructions on how to grow young plants to the appropriate stage (e.g., sprouted seedling stage) for harvesting and/or administration or harvesting into a formulation as described herein. In some related embodiments, hybrids or novel varieties embodying desired traits may be developed from inbred plants in accordance with the invention.

### Direct Integration

[0184] Direct integration of DNA fragments into the genome of plant cells by microprojectile bombardment or electroporation may also be used to introduce expression constructs encoding Plasmodium antigen polypeptides into plant tissues in accordance with the present invention (see, e.g., Kikkert, et al., 1999, Plant: J. Tiss. Cult. Assoc., 35:43; and Bates, 1994, Mol. Biotech., 2:135; both of which are incorporated herein by reference). More particularly, vectors that express Plasmodium antigen polypeptide(s) of the present invention can be introduced into plant cells by a variety of techniques. As described above, vectors may include selectable markers for use in plant cells. Vectors may include sequences that allow their selection and propagation in a secondary host, such as sequences containing an origin of replication and selectable marker. Typically, secondary hosts include bacteria and yeast. In some embodiments, a secondary host is bacteria (e.g., Escherichia coli, the origin of replication is a colE1-type origin of replication) and a selectable marker is a gene encoding ampicillin resistance. Such sequences are well known in the art and are commercially available (e.g., Clontech, Palo Alto, Calif. or Stratagene, La Jolla, Calif.).

[0185] Vectors of the present invention may be modified to intermediate plant transformation plasmids that contain a region of homology to an Agrobacterium tumefaciens vector, a T-DNA border region from Agrobacterium tumefaciens, and chimeric genes or expression cassettes described above. Further vectors may include a disarmed plant tumor inducing plasmid of Agrobacterium tumefaciens.

[0186] According to some embodiments, direct transformation of vectors invention may involve microinjecting vectors directly into plant cells by use of micropipettes to mechanically transfer recombinant DNA (see, e.g., Crossway, 1985, Mol. Gen. Genet., 202:179, incorporated herein by reference). Genetic material may be transferred into a plant cell using polyethylene glycols (see, e.g., Krens et al., 1982, Nature 296:72; incorporated herein by reference). Another method of introducing nucleic acids into plants via high velocity ballistic penetration by small particles with a nucleic acid either within the matrix of small beads or particles, or on the surface (see, e.g., Klein et al., 1987, Nature 327:70; and Knudsen et al., Planta, 185:330; both of which are incorporated herein by reference). Yet another method of introduction is fusion of protoplasts with other entities, either minicells, cells, lysosomes, or other fusible lipid-surfaced bodies (see, e.g., Fraley et al., 1982, Proc. Natl. Acad. Sci., USA, 79:1859; incorporated herein by reference). Vectors in accordance with the invention may be introduced into plant cells by electroporation (see, e.g., Fromm et al. 1985, Proc. Natl. Acad. Sci., USA, 82:5824; incorporated herein by reference). According to this technique, plant protoplasts are electroporated in the presence of plasmids containing a gene construct. Electrical impulses of high field strength reversibly penneabilize biomembranes allowing introduction of plasmids. Electroporated plant protoplasts reform the cell wall divide and form plant callus, which can be regenerated to form sprouted seedlings in accordance with the invention. Those skilled in the art will appreciate how to utilize these methods to transform plants cells that can be used to generate edible sprouted seedlings.

### Viral Transformation

[0187] Similar to conventional expression systems, plant viral vectors can be used to produce full-length proteins, including full length antigen. According to the present invention, plant virus vectors may be used to infect and produce antigen(s) in seeds, embryos, sprouted seedlings, etc. In this regard infection includes any method of introducing a viral genome, or portion thereof, into a cell, including, but not limited to, the natural infectious process of a virus, abrasion, inoculation, etc. The term includes introducing a genomic RNA transcript, or a cDNA copy thereof, into a cell. The viral genome need not be a complete genome but will typically contain sufficient sequences to allow replication. The genome may encode a viral replicase and may contain any cis-acting nucleic acid elements necessary for replication. Expression of high levels of foreign genes encoding short peptides as well as large complex proteins (e.g., by tobamoviral vectors) is described (see, e.g., McCormick et al., 1999, Proc. Natl. Acad. Sci., USA, 96:703; Kumagai et al. 2000, Gene, 245:169; and Verch et al., 1998, J. Immunol. Methods, 220:69; all of which are incorporated herein by reference). Thus, plant viral vectors have a demonstrated ability to express short peptides as well as large complex proteins.

[0188] In certain embodiments, young plants (e.g., sprouts), which express Plasmodium antigen polypeptide, are generated utilizing a host/virus system. Young plants produced by viral infection provide a source of transgenic protein that has already been demonstrated to be safe. For example, sprouts are free of contamination with animal pathogens. Unlike, for example, tobacco, proteins from an edible sprout could at least in theory be used in oral applications without purification, thus significantly reducing costs.

[0189] In addition, a virus/young plant (e.g., sprout) system offers a much simpler, less expensive route for scale-up and manufacturing, since the relevant genes (encoding the protein or polypeptide of interest) are introduced into the virus, which can be grown up to a commercial scale within a few days. In contrast, transgenic plants can require up to 5-7 years before sufficient seeds or plant material is available for large-scale trials or commercialization.

[0190] According to the present invention, plant RNA viruses have certain advantages, which make them attractive as vectors for foreign protein expression. The molecular biology and pathology of a number of plant RNA viruses are well characterized and there is considerable knowledge of virus biology, genetics, and regulatory sequences. Most plant RNA viruses have small genomes and infectious cDNA clones are available to facilitate genetic manipulation. Once infectious virus material enters a susceptible host cell, it replicates to high levels and spreads rapidly throughout the entire sprouted seedling (one to ten days post inoculation, e.g., 1 day, 2 days, 3 days, 4 days, 5 days, 6 days, 7 days, 8 days, 9 days, 10 days, or more than 10 days post-inoculation). Virus particles are easily and economically recovered from infected sprouted seedling tissue. Viruses have a wide host range, enabling use of a single construct for infection of several susceptible species. These characteristics are readily transferable to sprouts.

[0191] Foreign sequences can be expressed from plant RNA viruses, typically by replacing one of the viral genes with desired sequence, by inserting foreign sequences into the virus genome at an appropriate position, or by fusing foreign peptides to structural proteins of a virus. Moreover, any of these approaches can be combined to express foreign sequences by trans-complementation of vital functions of a virus. A number of different strategies exist as tools to express foreign sequences in virus-infected plants using tobacco mosaic virus (TMV), alfalfa mosaic virus (AlMV), and chimeras thereof

[0192] The genome of AlMV is a representative of the Bromoviridae family of viruses and consists of three genomic RNAs (RNAs1-3) and subgenomic RNA (RNA4). Genomic RNAs1 and 2 encode virus replicase proteins P1 and 2, respectively. Genomic RNA3 encodes cell-to-cell movement protein P3 and coat protein (CP). CP is translated from subgenomic RNA4, which is synthesized from genomic RNA3, and is required to start infection. Studies have demonstrated the involvement of CP in multiple functions, including genome activation, replication, RNA stability, symptom formation, and RNA encapsidation (see e.g., Bol et al., 1971, Virology, 46:73; Van Der Vossen et al., 1994, Virology 202:891; Yusibov et al., Virology, 208:405; Yusibov et al., 1998, Virology, 242:1; Bol et al., (Review, 100 refs.), 1999, J. Gen. Virol., 80:1089; De Graaff, 1995, Virology, 208:583; Jaspars et al., 1974, Adv. Virus Res., 19:37; Loesch-Fries, 1985, Virology, 146:177; Neeleman et al., 1991, Virology, 181:687; Neeleman et al., 1993, Virology, 196: 883; Van Der Kuyl et al., 1991, Virology, 183:731; and Van Der Kuyl et al., 1991, Virology, 185:496; all of which are incorporated herein by reference).

[0193] Encapsidation of viral particles is typically required for long distance movement of virus from inoculated to un-inoculated parts of seed, embryo, or sprouted seedling and for systemic infection. According to the present invention, inoculation can occur at any stage of plant development. In embryos and sprouts, spread of inoculated virus should be very rapid. Virions of AlMV are encapsidated by a unique CP (24 kD), forming more than one type of particle. The size (30- to 60-nm in length and 18 nm in diameter) and shape (spherical, ellipsoidal, or bacilliform) of the particle depends on the size of the encapsidated RNA. Upon assembly, the N-terminus of AlMV CP is thought to be located on the surface of the virus particles and does not appear to interfere with virus assembly (Bol et al., 1971, Virology, 6:73; incorporated herein by reference). Additionally, ALMV CP with an additional 38-amino acid peptide at its N-terminus forms particles in vitro and retains biological activity (Yusibov et al., 1995, J. Gen. Virol., 77:567; incorporated herein by reference).

[0194] AlMV has a wide host range, which includes a number of agriculturally valuable crop plants, including plant seeds, embryos, and sprouts. Together, these characteristics make ALMV CP an excellent candidate as a carrier molecule for polypeptides and AlMV an attractive candidate vector for expression of foreign polypeptide sequences in a plant at the sprout stage of development. Moreover, upon expression from a heterologous vector such as TMV, AlMV CP encapsidates TMV genome without interfering with virus infectivity (Yusibov et al., 1997, Proc. Natl. Acad. Sci., USA, 94:5784; incorporated herein by reference). This allows use of TMV as a carrier virus for AlMV CP fused to foreign sequences.

[0195] TMV, the prototype of tobamoviruses, has a genome consisting of a single plus-sense RNA encapsidated with a 17.0 kD CP, which results in rod-shaped particles (300 nm in length). CP is the only structural protein of TMV and is required for encapsidation and long distance movement of virus in an infected host (Saito et al., 1990, Virology 176:329; incorporated herein by reference). 183 and 126 kD proteins are translated from genomic RNA and are required for virus replication (Ishikawa et al., 1986, Nucleic Acids Res., 14:8291; incorporated herein by reference). 30 kD protein is the cell-to-cell movement protein of virus (Meshi et al., 1987, EMBO J., 6:2557). Movement and coat proteins are translated from subgenomic mRNAs (Hunter et al., 1976, Nature, 260:759; Bruening et al., 1976, Virology, 71:498; and Beachy et al., 1976, Virology, 73:498; all of which are incorporated herein by reference).

[0196] Other methods that may be utilized to introduce a gene encoding a Plasmodium polypeptide into plant cells include transforming the flower of a plant. Transformation of Arabidopsis thaliana can be achieved by dipping plant flowers into a solution of Agrobacterium tumefaciens (Curtis et al., 2001, Transgenic Res., 10:363; and Qing et al., 2000, Molecular Breeding: New Strategies in Plant Improvement 1:67; both of which are incorporated herein by reference). Transformed plants are formed in the population of seeds generated by “dipped” plants. At a specific point during flower development, a pore exists in the ovary wall through which Agrobacterium tumefaciens gains access to the interior of the ovary. Once inside the ovary, the Agrobacterium tumefaciens proliferates and transforms individual ovules (Desfeux et al., 2000, Plant Physiology, 123:895; incorporated herein by reference). Transformed ovules follow the typical pathway of seed formation within the ovary.

### Agrobacterium-Mediated Transient Expression

[0197] As indicated herein, in many embodiments of the present invention, systems for rapid (e.g., transient) expression of proteins or polypeptides in plants are desirable. Among other things, the present invention provides a powerful system for achieving such rapid expression in plants (particularly in young plants, e.g., sprouted seedlings) that utilizes an agrobacterial construct to deliver a viral expression system encoding a Plasmodium polypeptide.

[0198] Specifically, according to the present invention, a “launch vector” is prepared that contains agrobacterial sequences including replication sequences and also contains plant viral sequences (including self-replication sequences) that carry a gene encoding the protein or polypeptide of interest. A launch vector is introduced into plant tissue, preferably by agroinfiltration, which allows substantially systemic delivery. For transient transformation, non-integrated T-DNA copies of the launch vector remain transiently present in the nucleolus and are transcribed leading to the expression of the carrying genes (Kapila et al., 1997, Plant Science, 122:101-108; incorporated herein by reference). Agrobacterium-mediated transient expression, differently from viral vectors, cannot lead to the systemic spreading of the expression of the gene of interest. One advantage of this system is the possibility to clone genes larger than 2 kb to generate constructs that would be impossible to obtain with viral vectors (Voinnet et al., 2003, Plant J., 33:949-56; incorporated herein by reference). Furthermore, using such technique, it is possible to transform the plant with more than one transgene, such that multimeric proteins (e.g., antibodies subunits of complexed proteins) can be expressed and assembled. Furthermore, the possibility of co-expression of multiple transgenes by means of co-infiltration with different Agrobacterium can be taken advantage of, either by separate infiltration or using mixed cultures.

[0199] In certain embodiments, a launch vector includes sequences that allow for selection (or at least detection) in Agrobacteria and also for selection/detection in infiltrated tissues. Furthermore, a launch vector typically includes sequences that are transcribed in the plant to yield viral RNA production, followed by generation of viral proteins. Furthermore, production of viral proteins and viral RNA yields rapid production of multiple copies of RNA encoding the pharmaceutically active protein of interest. Such production results in rapid protein production of the target of interest in a relatively short period of time. Thus, a highly efficient system for protein production can be generated.

[0200] The agroinfiltration technique utilizing viral expression vectors can be used to produce limited quantity of protein of interest in order to verify the expression levels before deciding if it is worth generating transgenic plants. Alternatively or additionally, the agroinfiltration technique utilizing viral expression vectors is useful for rapid generation of plants capable of producing huge amounts of protein as a primary production platform. Thus, this transient expression system can be used on industrial scale.

[0201] Further provided are any of a variety of different Agrobacterial plasmids, binary plasmids, or derivatives thereof such as pBIV, pBI1221, pGreen, etc., which can be used in these and other aspects of the invention. Numerous suitable vectors are known in the art and can be directed and/or modified according to methods known in the art, or those described herein so as to utilize in the methods described provided herein.

[0202] An exemplary launch vector, pBID4, contains the 35S promoter of cauliflower mosaic virus (a DNA plant virus) that drives initial transcription of the recombinant viral genome following introduction into plants, and the nos terminator, the transcriptional terminator of Agrobacterium nopaline synthase. The vector further contains sequences of the tobacco mosaic virus genome including genes for virus replication (126/183K) and cell-t-cell movement (MP). The vector further contains a gene encoding a polypeptide of interest, inserted into a unique cloning site within the tobacco mosaic virus genome sequences and under the transcriptional control of the coat protein subgenomic mRNA promoter. Because this “target gene” (i.e., gene encoding a protein or polypeptide of interest) replaces coding sequences for the TMV coat protein, the resultant viral vector is naked self-replicating RNA that is less subject to recombination than CP-containing vectors, and that cannot effectively spread and survive in the environment. Left and right border sequences (LB and RB) delimit the region of the launch vector that is transferred into plant cells following infiltration of plants with recombinant Agrobacterium carrying the vector. Upon introduction of agrobacteria carrying this vector into plant tissue (typically by agroinfiltration but alternatively by injection or other means), multiple single-stranded DNA (ssDNA) copies of sequence between LB and RB are generated and released in a matter of minutes. These introduced sequences are then amplified by viral replication. Translation of the target gene results in accumulation of large amounts of target protein or polypeptide in a short period of time.

[0203] In some embodiments, Agrobacterium-mediated transient expression produces up to about 5 g or more of target protein per kg of plant tissue. For example, in some embodiments, up to about 4 g, about 3 g, about 2 g, about 1 g, or about 0.5 g of target protein is produced per kg of plant tissue. In some embodiments, at least about 20 mg to about 500 mg, or about 50 mg to about 500 mg of target protein, or about 50 mg to about 200 mg, or about 50 mg, about 60 mg, about 70 mg, about 80 mg, about 90 mg, about 100 mg, about 110 mg, about 120 mg, about 130 mg, about 140 mg, about 150 mg, about 160 mg, about 170 mg, about 180 mg, about 190 mg, about 200 mg, about 250 mg, about 300 mg, about 350 mg, about 400 mg, about 450 mg, about 500 mg, about 550 mg, about 600 mg, about 650 mg, about 700 mg, about 750 mg, about 800 mg, about 850 mg, about 900 mg, about 950 mg, about 1000 mg, about 1500 mg, about 1750 mg, about 2000 mg, about 2500 mg, about 3000 mg or more of protein per kg of plant tissue is produced.

[0204] In some embodiments, these expression levels are achieved within about 6, about 5, about 4, about 3, or about 2 weeks from infiltration. In some embodiments, these expression levels are achieved within about 10, about 9, about 8, about 7, about 6, about 5, about 4, about 3, about 2 days, or even about 1 day, from introduction of the expression construct. Thus, the time from introduction (e.g., infiltration) to harvest is typically less than about 2 weeks, about 10 days, about 1 week or less. This allows production of protein within about 8 weeks or less from the selection of amino acid sequence (even including time for “preliminary” expression studies). Also, each batch of protein can typically be produced within about 8 weeks, about 6 weeks, about 5 weeks, or less. Those of ordinary skill in the art will appreciate that these numbers may vary somewhat depending on the type of plant used. Most sprouts, including peas, will fall within the numbers given. Nicotiana benthamiana, however, may be grown longer, particularly prior to infiltration, as they are slower growing (from a much smaller seed). Other expected adjustments will be clear to those of ordinary skill in the art based on biology of the particular plants utilized.

[0205] The present inventors have used a launch vector system to produce a variety of target proteins and polypeptides in a variety of different young plants. In some embodiments, certain pea varieties including for example, marrowfat pea, bill jump pea, yellow trapper pea, speckled pea, and green pea are particularly useful in the practice of this aspect of the invention.

[0206] The inventors have also found that various Nicotiana plants are particularly useful in the practice of this aspect of the invention, including in particular Nicotiana benthamiana. It will be understood by those of ordinary skill in the art that Nicotiana plants are generally not considered to be “sprouts.” Nonetheless, the present invention teaches that young Nicotiana plants (particularly young Nicotiana benthamiana plants) are useful in the practice of the invention. In general, in some embodiments, Nicotiana benthamiana plants are grown for a time sufficient to allow development of an appropriate amount of biomass prior to infiltration (i.e., to delivery of agrobacteria containing the launch vector). Typically, the plants are grown for a period of more than about 3 weeks, more typically more than about 4 weeks, or between about 5 to about 6 weeks to accumulate biomass prior to infiltration.

[0207] The present inventors have further surprisingly found that, although both TMV and AlMV sequences can prove effective in such launch vector constructs, in some embodiments, AlMV sequences can be efficient at ensuring production of delivered protein or polypeptides.

[0208] Thus, in certain particular embodiments of the present invention, proteins or polypeptides of interest are produced in young pea plants or young Nicotania plants (e.g., Nicotiana benthamiana) from a launch vector that directs production of AlMV sequences carrying the gene of interest.

### Expression Constructs

[0209] Many features of expression constructs useful in accordance with the present invention will be specific to the particular expression system used, as discussed above. However, certain aspects that may be applicable across different expression systems are discussed in further detail here.

[0210] To give but one example, in many embodiments of the present invention, it will be desirable that expression of the protein or polypeptide (or nucleic acid) of interest be inducible. In many such embodiments, production of an RNA encoding the protein or polypeptide of interest (and/or production of an antisense RNA) is under the control of an inducible (e.g. exogenously inducible) promoter. Exogenously inducible promoters are caused to increase or decrease expression of a transcript in response to an external, rather than an internal stimulus. A number of environmental factors can act as such an external stimulus. In certain embodiments, transcription is controlled by a heat-inducible promoter, such as a heat-shock promoter.

[0211] Externally inducible promoters may be particularly useful in the context of controlled, regulatable growth settings. For example, using a heat-shock promoter the temperature of a contained environment may simply be raised to induce expression of the relevant transcript. In will be appreciated, of course, that a heat inducible promoter could never be used in the outdoors because the outdoor temperature cannot be controlled. The promoter would be turned on any time the outdoor temperature rose above a certain level. Similarly, the promoter would be turned off every time the outdoor temperature dropped. Such temperature shifts could occur in a single day, for example, turning expression on in the daytime and off at night. A heat inducible promoter, such as those described herein, would likely not even be practical for use in a greenhouse, which is susceptible to climatic shifts to almost the same degree as the outdoors. Growth of genetically engineered plants in a greenhouse is quite costly. In contrast, in the present system, every variable can be controlled so that the maximum amount of expression can be achieved with every harvest.

[0212] Other externally-inducible promoters than can be utilized in accordance with the present invention include light inducible promoters. Light-inducible promoters can be maintained as constitutive promoters if the light in the contained regulatable environment is always on. Alternatively, expression of the relevant transcript can be turned on at a particular time during development by simply turning on the light.

[0213] In yet other embodiments, a chemically inducible promoter is used to induce expression of the relevant transcript. According to these embodiments, the chemical could simply be misted or sprayed onto a seed, embryo, or young plant (e.g., seedling) to induce expression of the relevant transcript. Spraying and misting can be precisely controlled and directed onto a particular seed, embryo, or young plant (e.g., seedling) as desired. A contained environment is devoid of wind or air currents, which could disperse the chemical away from the intended recipient, so that the chemical stays on the recipient for which it was intended.

[0214] In some embodiments, the Plasmodium polypeptides of the invention can be co-expressed with chaperone proteins to assist in the folding of the Plasmodium polypeptide. Molecular chaperones are well known in the art and can include Plasmodium chaperones, for example, protein disulfide isomerase (PDI); peptidyl-prolyl cis-trans isomerase (PPI); DnaJ or Hsp 40 homologues (Pt)); DnaK or Hsp 70 homologues (BiP); and endoplasmin homologue or Grp94 (Hsp 90), or homologues from other species.

### Production and Isolation of Antigen

[0215] In general, standard methods known in the art may be used for culturing or growing plants, plant cells, and/or plant tissues in accordance with the invention (e.g., clonal plants, clonal plant cells, clonal roots, clonal root lines, sprouts, sprouted seedlings, plants, etc.) for production of antigen(s). A wide variety of culture media and bioreactors have been employed to culture hairy root cells, root cell lines, and plant cells (see, for example, Giri et al., 2000, Biotechnol. Adv., 18:1; Rao et al., 2002, Biotechnol. Adv., 20:101; and references in both of the foregoing, all of which are incorporated herein by reference). Clonal plants may be grown in any suitable manner.

[0216] In a certain embodiments, Plasmodium antigen polypeptides in accordance with the invention may be produced by any known method. In some embodiments, a Plasmodium antigen polypeptide is expressed in a plant or portion thereof. Proteins are isolated and purified in accordance with conventional conditions and techniques known in the art. These include methods such as extraction, precipitation, chromatography, affinity chromatography, electrophoresis, and the like. The present invention involves purification and affordable scaling up of production of Plasmodium antigen polypeptide(s) using any of a variety of plant expression systems known in the art and provided herein, including viral plant expression systems described herein.

[0217] In many embodiments of the present invention, it will be desirable to isolate Plasmodium antigen polypeptide(s) for vaccine products. Where a protein in accordance with the invention is produced from plant tissue(s) or a portion thereof, e.g., roots, root cells, plants, plant cells, that express them, methods described in further detail herein, or any applicable methods known in the art may be used for any of partial or complete isolation from plant material. Where it is desirable to isolate the expression product from some or all of plant cells or tissues that express it, any available purification techniques may be employed. Those of ordinary skill in the art are familiar with a wide range of fractionation and separation procedures (see, for example, Scopes et al., Protein Purification: Principles and Practice, 3^{rd} Ed., Janson et al., 1993; Protein Purification: Principles, High Resolution Methods, and Applications, Wiley-VCH, 1998; Springer-Verlag, NY, 1993; and Roe, Protein Purification Techniques, Oxford University Press, 2001; each of which is incorporated herein by reference). Often, it will be desirable to render the product more than about 50%, about 60%, about 70%, about 80%, about 85%, about 90%, about 91%, about 92%, about 93%, about 94%, about 95%, about 96%, about 97%, about 98%, or about 99% pure. See, e.g., U.S. Pat. Nos. 6,740,740 and 6,841,659 (both of which are incorporated herein by reference) for discussion of certain methods useful for purifying substances from plant tissues or fluids.

[0218] Those skilled in the art will appreciate that a method of obtaining desired Plasmodium antigen polypeptide(s) product(s) is by extraction. Plant material (e.g., roots, leaves, etc.) may be extracted to remove desired products from residual biomass, thereby increasing the concentration and purity of product. Plants may be extracted in a buffered solution. For example, plant material may be transferred into an amount of ice-cold water at a ratio of one to one by weight that has been buffered with, e.g., phosphate buffer. Protease inhibitors can be added as required. The plant material can be disrupted by vigorous blending or grinding while suspended in buffer solution and extracted biomass removed by filtration or centrifugation. The product carried in solution can be further purified by additional steps or converted to a dry powder by freeze-drying or precipitation. Extraction can be carried out by pressing. Plants or roots can be extracted by pressing in a press or by being crushed as they are passed through closely spaced rollers. Fluids expressed from crushed plants or roots are collected and processed according to methods well known in the art. Extraction by pressing allows release of products in a more concentrated form. However, overall yield of product may be lower than if product were extracted in solution.

[0219] In some embodiments, polypeptides can be further purified by chromatographic methods including, but not limited to anion exchange chromatography (Q Column) or ultrafiltration. Polypeptides that contain His-tags can be purified using nickel-exchange chromatography according to standard methods.

[0220] In some embodiments, produced proteins or polypeptides are not isolated from plant tissue but rather are provided in the context of live plants (e.g., sprouted seedlings). In some embodiments, where the plant is edible, plant tissue containing expressed protein or polypeptide is provided directly for consumption. Thus, the present invention provides edible young plant biomass (e.g., edible sprouted seedlings) containing expressed protein or polypeptide.

[0221] Where edible plants (e.g., sprouted seedlings) express sufficient levels of pharmaceutical proteins or polypeptides and are consumed live, in some embodiments absolutely no harvesting occurs before the sprouted seedlings are consumed. In this way, it is guaranteed that there is no harvest-induced proteolytic breakdown of the pharmaceutical protein before administration of the pharmaceutical protein to a subject in need of treatment. For example, young plants (e.g., sprouted seedlings) that are ready to be consumed can be delivered directly to a subject. Alternatively, genetically engineered seeds or embryos are delivered to a subject in need of treatment and grown to the sprouted seedling stage by the subject. In some embodiments, a supply of genetically engineered sprouted seedlings is provided to a subject, or to a clinician who will be treating subjects, so that a continual stock of sprouted seedlings expressing certain desirable pharmaceutical proteins may be cultivated. This may be particularly valuable for populations in developing countries, where expensive pharmaceuticals are not affordable or deliverable. The ease with which the sprouted seedlings in accordance with the invention can be grown makes the sprouted seedlings of the present invention particularly desirable for such developing populations.

[0222] In some embodiments, plant biomass is processed prior to consumption or formulation, for example, by homogenizing, crushing, drying, or extracting. In some embodiments, the expressed protein or polypeptide is isolated or purified from the biomass and formulated into a pharmaceutical composition.

[0223] For example, live plants (e.g., sprouts) may be ground, crushed, or blended to produce a slurry of biomass, in a buffer containing protease inhibitors. Preferably the buffer is at about 4° C. In certain embodiments, the biomass is air-dried, spray dried, frozen, or freeze-dried. As in mature plants, some of these methods, such as air-drying, may result in a loss of activity of the pharmaceutical protein or polypeptide. However, because plants (e.g., sprouted seedlings) may be very small and typically have a large surface area to volume ratio, this is much less likely to occur. Those skilled in the art will appreciate that many techniques for harvesting the biomass that minimize proteolysis of the pharmaceutical protein or polypeptide are available and could be applied to the present invention.

### Vaccines

[0224] The present invention provides vaccine compositions comprising a least one Plasmodium antigen polypeptide, fusion thereof; and/or immunogenic portion(s) thereof, which are intended to elicit a physiological effect upon administration to a subject. A vaccine protein may have healing curative or palliative properties against a disorder or disease and can be administered to ameliorate relieve, alleviate, delay onset of; reverse or lessen symptoms or severity of a disease or disorder. A vaccine comprising a Plasmodium antigen polypeptide may have prophylactic properties and can be used to prevent or delay the onset of a disease or to lessen the severity of such disease, disorder, or pathological condition when it does emerge or to reduce or block the transmission of the disease to an uninfected subject. A physiological effect elicited by treatment of a subject with antigen according to the present invention can include an effective immune response. Ingestion by a mosquito of blood containing such antibodies can serve to block the sexual-stage development of Plasmodium in the mosquito and thereby block transmission of Plasmodium to another, uninfected subject such that infection by an organism is thwarted. Considerations for administration of Plasmodium antigen polypeptides to a subject in need thereof are discussed in further detail in the section below entitled “Administration.”

[0225] In general, active vaccination involves the exposure of a subject's immune system to one or more agents that are recognized as unwanted, undesired, and/or foreign and elicit an endogenous immune response. Typically, such an immune response results in the activation of antigen-specific naive lymphocytes that then give rise to antibody-secreting B cells or antigen-specific effector and memory T cells or both. This approach can result in long-lived immunity that may be boosted from time to time by renewed exposure to the same antigenic material.

[0226] In some embodiments, a vaccine composition comprising at least one Plasmodium antigen polypeptide is a subunit vaccine. In general, a subunit vaccine comprises purified antigens rather than whole organisms. Subunit vaccines are not infectious, so they can safely be given to immunosuppressed people, and they are less likely to induce unfavorable immune reactions and/or other adverse side effects. One potential disadvantage of subunit vaccines are that the antigens may not retain their native conformation, so that antibodies produced against the subunit may not recognize the same protein on the pathogen surface; and isolated protein does not stimulate the immune system as well as a whole organism vaccine. Therefore, in some situations, it may be necessary to administer subunit vaccines in higher doses than a whole-agent vaccine (e.g., live attenuated vaccines, inactivated pathogen vaccines, etc.) in order to achieve the same therapeutic effect. In contrast, whole-agent vaccines, such as vaccines that utilize live attenuated or inactivated pathogens, typically yield a vigorous immune response, but their use has limitations. For example, live vaccine strains can sometimes cause infectious pathologies, especially when administered to immune-compromised recipients.

[0227] In some embodiments, vaccines in accordance with the present invention comprising one or more plant-produced Plasmodium antigen polypeptides (e.g., Pfs25, Pfs28, Pfs48/45, and Pfs230 polypeptides, as described herein) can be administered to a subject and can stimulate immune responses. In some embodiments, less than about 200 μg, less than about 150 μg, less than about 100 μg, less than about 90 μg, less than about 80 μg, less than about 70 μg, less than about 60 μg, less than about 50 μg, less than about 40 μg, less than about 35 μg, less than about 30 μg, less than about 25 μg, less than about 20 μg, less than about 15 μg, less than about 5 μg, less than about 4 μg, less than about 3 μg, less than about 2 μg, less than about 1 μg, less than about 0.1 μg, less than about 0.01 μg of plant-produced Plasmodium antigen polypeptide and/or immunogenic portion thereof can be used to stimulate an immune response and/or to prevent, delay the onset of, and/or provide protection against Plasmodium infection (e.g., malaria).

[0228] In some embodiments, the present invention provides vaccines against Plasmodium parasites. In some embodiments, vaccines comprise an antigen that has been at least partially purified from non-antigenic components. For example, a vaccine may be a Plasmodium antigen polypeptide, fusion thereof, and/or immunogenic portion thereof that is expressed in a live organism (such as a plant, virus, bacterium, yeast, mammalian cell, egg, etc.), but is at least partially purified from the non-antigen components of the live organism. In some embodiments, a vaccine is at least 30%, at least 40%, at least 50%, at least 60%, at least 70%, at least 80%, at least 90%, at least 95%, at least 98%, or at least 99% purified from the non-antigen components of the organism in which the antigen was expressed. In some embodiments, a vaccine may be a Plasmodium antigen polypeptide, fusion thereof, and/or immunogenic portion thereof that is chemically-synthesized.

[0229] In some embodiments, a vaccine may be a Plasmodium antigen polypeptide, fusion thereof, and/or immunogenic portion thereof that is expressed in a live organism (such as a plant, virus, bacterium, yeast, mammalian cell, egg, etc.), but is not at least partially purified from the non-antigen components of the live organism. For example, a vaccine may be a Plasmodium antigen polypeptide, fusion thereof, and/or immunogenic portion thereof that is expressed in a live organism that is administered directly to a subject in order to elicit an immune response. In some embodiments, a vaccine may be a Plasmodium antigen polypeptide, fusion thereof, and/or immunogenic portion thereof that is expressed in a plant, as described herein, wherein the plant material is administered directly to a subject in order to elicit an immune response.

[0230] The present invention provides pharmaceutical Plasmodium antigen polypeptides, fusions thereof; and/or immunogenic portions thereof, active as vaccines for therapeutic and/or prophylactic treatment and transmission blocking of Plasmodium infection (e.g., malaria). In certain embodiments, Plasmodium antigen polypeptides may be produced by plant(s) or portion thereof (e.g., root, cell, sprout, cell line, plant, etc.) in accordance with the invention. In certain embodiments, provided Plasmodium antigen polypeptides are expressed in plants, plant cells, and/or plant tissues (e.g., sprouts, sprouted seedlings, roots, root culture, clonal cells, clonal cell lines, clonal plants, etc.), and can be used directly from plant or partially purified or purified in preparation for pharmaceutical administration to a subject.

[0231] The present invention provides plants, plant cells, and plant tissues expressing Plasmodium antigen polypeptides that maintain pharmaceutical activity when administered to a subject in need thereof. Exemplary subjects include vertebrates (e.g., mammals such as humans). According to the present invention, subjects include veterinary subjects such as non-human primates, bovines, ovines, canines, felines, rodents, birds, etc. In certain aspects, an edible plant or portion thereof (e.g., sprout, root) is administered orally to a subject in a therapeutically effective amount. In some aspects one or more Plasmodium antigen polypeptides are provided in a pharmaceutical preparation, as described herein.

[0232] Where it is desirable to formulate a Plasmodium vaccine comprising plant material, it will often be desirable to have utilized a plant that is not toxic to the relevant recipient (e.g., a human or other animal). Relevant plant tissue (e.g., cells, roots, leaves) may simply be harvested and processed according to techniques known in the art, with due consideration to maintaining activity of the expressed product. In certain embodiments, it is desirable to have expressed Plasmodium antigen polypeptides in an edible plant (and, specifically in edible portions of the plant) so that the material can subsequently be eaten. For instance, where vaccine antigen is active after oral delivery (when properly formulated), it may be desirable to produce antigen protein in an edible plant portion, and to formulate expressed Plasmodium antigen polypeptide for oral delivery together with some or all of the plant material with which the protein was expressed.

[0233] Vaccine compositions in accordance with the invention comprise one or more Plasmodium antigen polypeptides. In certain embodiments, exactly one Plasmodium antigen polypeptide is included in an administered vaccine composition. In certain embodiments, at least two Plasmodium antigen polypeptides are included in an administered vaccine composition. In some aspects, combination vaccines may include one thermostable fusion protein comprising a Plasmodium antigen polypeptide; in some aspects, two or more thermostable fusion proteins comprising Plasmodium antigen polypeptides are provided.

[0234] In some embodiments, vaccine compositions comprise exactly one Plasmodium polypeptide (e.g., exactly one polypeptide selected from the group consisting of Pfs25, Pfs28, Pfs48/45, and Pfs230 polypeptides). In some embodiments, vaccine compositions comprise exactly two Plasmodium polypeptides (e.g., exactly two polypeptides selected from the group consisting of Pfs25, Pfs28, Pfs48/45, and Pfs230 polypeptides). In some embodiments, vaccine compositions comprise exactly three Plasmodium polypeptides (e.g., exactly three polypeptides selected from the group consisting of Pfs25, Pfs28, Pfs48/45, and Pfs230 polypeptides). In some embodiments, vaccine compositions comprise four or more (e.g., 4, 5, 6, 7, 8, 9, 10, 15, or more) Plasmodium polypeptide (e.g., four or more polypeptides selected from the group consisting of Pfs25, Pfs28, Pfs48/45, and Pfs230 polypeptides).

[0235] In some embodiments, vaccine compositions comprise polytopes (i.e., tandem fusions of two or more amino acid sequences) of two or more Plasmodium antigen polypeptides and/or immunogenic portions thereof. For example, in some embodiments, a polytope comprises exactly one Pfs25, Pfs28, Pfs48/45, and/or Pfs230 polypeptide. In some embodiments, a polytope comprises exactly two Pfs25, Pfs28, Pfs48/45, and/or Pfs230 polypeptides. In some embodiments, a polytope comprises exactly three Pfs25, Pfs28, Pfs48/45, and/or Pfs230 polypeptides. In some embodiments, a polytope comprises four or more (e.g., 4, 5, 6, 7, 8, 9, 10, 15, or more) Pfs25, Pfs28, Pfs48/45, and/or Pfs230 polypeptides.

[0236] Where combination vaccines are utilized, it will be understood that any combination of Plasmodium antigen polypeptides may be used for such combinations. Compositions may include multiple Plasmodium antigen polypeptides, including multiple antigens provided herein. Furthermore, compositions may include one or more antigens provided herein with one or more additional antigens. Combinations of Plasmodium antigen polypeptides include Plasmodium antigen polypeptides derived from one or more various subtypes or strains such that immunization confers immune response against more than one infection type. Combinations of Plasmodium antigen polypeptides may include at least one, at least two, at least three, at least four or more antigens derived from different subtypes or strains. In some combinations, at least two or at least three antigens from different subtypes are combined in one vaccine composition. Furthermore, combination vaccines may utilize Plasmodium antigen polypeptides and antigen from one or more unique infectious agents.

### Additional Vaccine Components

[0237] Vaccine compositions in accordance with the invention may include additionally any suitable adjuvant to enhance the immunogenicity of the vaccine when administered to a subject. For example, such adjuvant(s) may include, without limitation, saponins, such as extracts of Quillaja saponaria (QS), including purified subfractions of food grade QS such as Quil A and QS21; alum; metallic salt particles (e.g., aluminum hydroxide, aluminum phosphate, etc.); mineral oil; MF59; Malp2; incomplete Freund's adjuvant; complete Freund's adjuvant; alhydrogel; 3 De-O-acylated monophosphoryl lipid A (3D-MPL); lipid A; Bortadella pertussis; Mycobacterium tuberculosis; Merck Adjuvant 65 (Merck and Company, Inc., Rahway, N.J.); AS03; squalene; virosomes; oil-in-water emulsions (e.g., SBAS2); liposome formulations (e.g., SBAS1); etc. Further adjuvants include immunomodulatory oligonucleotides, for example unmethylated CpG sequences as disclosed in WO 96/02555. Combinations of different adjuvants, such as those mentioned hereinabove, are contemplated as providing an adjuvant which is a preferential stimulator of TH1 cell response. For example, QS21 can be formulated together with 3D-MPL. The ratio of QS21:3D-MPL will typically be in the order of 1:10 to 10:1; 1:5 to 5:1; and often substantially 1:1. The desired range for optimal synergy may be 2.5:1 to 1:1 3D-MPL: QS21. Doses of purified QS extracts suitable for use in a human vaccine formulation are from 0.01 mg to 10 mg per kilogram of bodyweight.

[0238] It should be noted that certain thermostable proteins (e.g., lichenase) may themselves demonstrate immunoresponse potentiating activity, such that use of such protein whether in a fusion with a Plasmodium antigen polypeptide or separately may be considered use of an adjuvant. Thus, inventive vaccine compositions may further comprise one or more adjuvants. Certain vaccine compositions may comprise two or more adjuvants. Furthermore, depending on formulation and routes of administration, certain adjuvants may be desired in particular formulations and/or combinations.

[0239] In certain situations, it may be desirable to prolong the effect of an inventive vaccine by slowing the absorption of one or more components of the vaccine product (e.g., protein) that is subcutaneously or intramuscularly injected. This may be accomplished by use of a liquid suspension of crystalline or amorphous material with poor water solubility. The rate of absorption of product then depends upon its rate of dissolution, which in turn, may depend upon size and form. Alternatively or additionally, delayed absorption of a parenterally administered product is accomplished by dissolving or suspending the product in an oil vehicle. Injectable depot forms are made by forming microcapsule matrices of protein in biodegradable polymers such as polylactide-polyglycolide. Depending upon the ratio of product to polymer and the nature of the particular polymer employed, rate of release can be controlled. Examples of biodegradable polymers include poly(orthoesters) and poly(anhydrides). Depot injectable formulations may be prepared by entrapping product in liposomes or microemulsions, which are compatible with body tissues. Alternative polymeric delivery vehicles can be used for oral formulations. For example, biodegradable, biocompatible polymers such as ethylene vinyl acetate, polyanhydrides, polyglycolic acid, collagen, polyorthoesters, and polylactic acid, etc., can be used. Antigen(s) or an immunogenic portions thereof may be formulated as microparticles, e.g., in combination with a polymeric delivery vehicle.

[0240] Enterally administered preparations of vaccine antigens may be introduced in solid, semi-solid, suspension or emulsion form and may be compounded with any pharmaceutically acceptable carriers, such as water, suspending agents, and emulsifying agents. Antigens may be administered by means of pumps or sustained-release forms, especially when administered as a preventive measure, so as to prevent the development of disease in a subject or to ameliorate or delay an already established disease. Supplementary active compounds, e.g., compounds independently active against the disease or clinical condition to be treated, or compounds that enhance activity of an inventive compound, can be incorporated into or administered with compositions. Flavorants and coloring agents can be used.

[0241] Inventive vaccine products, optionally together with plant tissue, are particularly well suited for oral administration as pharmaceutical compositions. Oral liquid formulations can be used and may be of particular utility for pediatric populations. Harvested plant material may be processed in any of a variety of ways (e.g., air drying, freeze drying, extraction etc.), depending on the properties of the desired therapeutic product and its desired form. Such compositions as described above may be ingested orally alone or ingested together with food or feed or a beverage. Compositions for oral administration include plants; extractions of plants, and proteins purified from infected plants provided as dry powders, foodstuffs, aqueous or non-aqueous solvents, suspensions, or emulsions. Examples of non-aqueous solvents are propylene glycol, polyethylene glycol, vegetable oil, fish oil, and injectable organic esters. Aqueous carriers include water, water-alcohol solutions, emulsions or suspensions, including saline and buffered medial parenteral vehicles including sodium chloride solution, Ringer's dextrose solution, dextrose plus sodium chloride solution, Ringer's solution containing lactose or fixed oils. Examples of dry powders include any plant biomass that has been dried, for example, freeze dried, air dried, or spray dried. For example, plants may be air dried by placing them in a commercial air dryer at about 120° F. until biomass contains less than 5% moisture by weight. The dried plants may be stored for further processing as bulk solids or further processed by grinding to a desired mesh sized powder. Alternatively or additionally, freeze-drying may be used for products that are sensitive to air-drying. Products may be freeze dried by placing them into a vacuum drier and dried frozen under a vacuum until the biomass contains less than about 5% moisture by weight. Dried material can be further processed as described herein.

[0242] Plant-derived material may be administered as or together with one or more herbal preparations. Useful herbal preparations include liquid and solid herbal preparations. Some examples of herbal preparations include tinctures, extracts (e.g., aqueous extracts, alcohol extracts), decoctions, dried preparations (e.g., air-dried, spray dried, frozen, or freeze-dried), powders (e.g., lyophilized powder), and liquid. Herbal preparations can be provided in any standard delivery vehicle, such as a capsule, tablet, suppository, liquid dosage, etc. Those skilled in the art will appreciate the various formulations and modalities of delivery of herbal preparations that may be applied to the present invention.

[0243] Pharmaceutical formulations of the present invention may additionally comprise a pharmaceutically acceptable excipient, which, as used herein, includes any and all solvents, dispersion media, diluents, or other liquid vehicles, dispersion or suspension aids, surface active agents, isotonic agents, thickening or emulsifying agents, preservatives, solid binders, lubricants and the like, as suited to the particular dosage form desired. Remington's The Science and Practice of Pharmacy, 21^{st} Edition, A. R. Gennaro, (Lippincott, Williams & Wilkins, Baltimore, Md., 2006) discloses various excipients used in formulating pharmaceutical compositions and known techniques for the preparation thereof Except insofar as any conventional excipient medium is incompatible with a substance or its derivatives, such as by producing any undesirable biological effect or otherwise interacting in a deleterious manner with any other component(s) of the pharmaceutical composition, its use is contemplated to be within the scope of this invention.

[0244] In some embodiments, the pharmaceutically acceptable excipient is at least 95%, at least 96%, at least 97%, at least 98%, at least 99%, or 100% pure. In some embodiments, the excipient is approved for use in humans and for veterinary use. In some embodiments, the excipient is approved by United States Food and Drug Administration. In some embodiments, the excipient is pharmaceutical grade. In some embodiments, the excipient meets the standards of the United States Pharmacopoeia (USP), the European Pharmacopoeia (EP), the British Pharmacopoeia, and/or the International Pharmacopoeia.

[0245] Pharmaceutically acceptable excipients used in the manufacture of pharmaceutical compositions include, but are not limited to, inert diluents, dispersing and/or granulating agents, surface active agents and/or emulsifiers, disintegrating agents, binding agents, preservatives, buffering agents, lubricating agents, and/or oils. Such excipients may optionally be included in the formulations. Excipients such as cocoa butter and suppository waxes, coloring agents, coating agents, sweetening, flavoring, and/or perfuming agents can be present in the composition, according to the judgment of the formulator.

[0246] Exemplary diluents include, but are not limited to, calcium carbonate, sodium carbonate, calcium phosphate, dicalcium phosphate, calcium sulfate, calcium hydrogen phosphate, sodium phosphate lactose, sucrose, cellulose, microcrystalline cellulose, kaolin, mannitol, sorbitol, inositol, sodium chloride, dry starch, cornstarch, powdered sugar, etc., and/or combinations thereof

[0247] Exemplary granulating and/or dispersing agents include, but are not limited to, potato starch, corn starch, tapioca starch, sodium starch glycolate, clays, alginic acid, guar gum, citrus pulp, agar, bentonite, cellulose and wood products, natural sponge, cation-exchange resins, calcium carbonate, silicates, sodium carbonate, cross-linked poly(vinyl-pyrrolidone) (crospovidone), sodium carboxymethyl starch (sodium starch glycolate), carboxymethyl cellulose, cross-linked sodium carboxymethyl cellulose (croscarmellose), methylcellulose, pregelatinized starch (starch 1500), microcrystalline starch, water insoluble starch, calcium carboxymethyl cellulose, magnesium aluminum silicate (VEEGUM®), sodium lauryl sulfate, quaternary ammonium compounds, etc., and/or combinations thereof.

[0248] Exemplary surface active agents and/or emulsifiers include, but are not limited to, natural emulsifiers (e.g., acacia, agar, alginic acid, sodium alginate, tragacanth, chondrux, cholesterol, xanthan, pectin, gelatin, egg yolk, casein, wool fat, cholesterol, wax, and lecithin), colloidal clays (e.g., bentonite [aluminum silicate] and VEEGUM® [magnesium aluminum silicate]), long chain amino acid derivatives, high molecular weight alcohols (e.g., stearyl alcohol, cetyl alcohol, oleyl alcohol, triacetin monostearate, ethylene glycol distearate, glyceryl monostearate, and propylene glycol monostearate, polyvinyl alcohol), carbomers (e.g., carboxy polymethylene, polyacrylic acid, acrylic acid polymer, and carboxyvinyl polymer), carrageenan, cellulosic derivatives (e.g., carboxymethylcellulose sodium, powdered cellulose, hydroxymethyl cellulose, hydroxypropyl cellulose, hydroxypropyl methylcellulose, methylcellulose), sorbitan fatty acid esters (e.g., polyoxyethylene sorbitan monolaurate [TWEEN®20], polyoxyethylene sorbitan [TWEEN®60], polyoxyethylene sorbitan monooleate [TWEEN ®80], sorbitan monopalmitate [SPAN®40], sorbitan monostearate [SPAN®60], sorbitan tristearate [SPAN ®65], glyceryl monooleate, sorbitan monooleate [SPAN ®80]), polyoxyethylene esters (e.g., polyoxyethylene monostearate [MYRJ®45], polyoxyethylene hydrogenated castor oil, polyethoxylated castor oil, polyoxymethylene stearate, and SOLUTOL®), sucrose fatty acid esters, polyethylene glycol fatty acid esters (e.g., CREMOPHOR®), polyoxyethylene ethers, (e.g., polyoxyethylene lauryl ether [BRIJ®30]), poly(vinyl-pyrrolidone), diethylene glycol monolaurate, triethanolamine oleate, sodium oleate, potassium oleate, ethyl oleate, oleic acid, ethyl laurate, sodium lauryl sulfate, PLURONIC®F 68, POLOXAMER®1 88, cetrimonium bromide, cetylpyridinium chloride, benzalkonium chloride, docusate sodium, etc. and/or combinations thereof.

[0249] Exemplary binding agents include, but are not limited to, starch (e.g., cornstarch, starch paste, etc.); gelatin; sugars (e.g., sucrose, glucose, dextrose, dextrin, molasses, lactose, lactitol, mannitol, etc.); natural and synthetic gums (e.g., acacia, sodium alginate, extract of Irish moss, panwar gum, ghatti gum, mucilage of isapol husks, carboxymethylcellulose, methylcellulose, ethylcellulose, hydroxyethylcellulose, hydroxypropyl cellulose, hydroxypropyl methylcellulose, microcrystalline cellulose, cellulose acetate, poly(vinyl-pyrrolidone), magnesium aluminum silicate [VEEGUM®], larch arabogalactan, etc.); alginates; polyethylene oxide; polyethylene glycol; inorganic calcium salts; silicic acid; polymethacrylates; waxes; water; alcohol; etc.; and combinations thereof.

[0250] Exemplary preservatives may include, but are not limited to, antioxidants, chelating agents, antimicrobial preservatives, antifungal preservatives, alcohol preservatives, acidic preservatives, and/or other preservatives. Exemplary antioxidants include, but are not limited to, alpha tocopherol, ascorbic acid, acorbyl palmitate, butylated hydroxyanisole, butylated hydroxytoluene, monothioglycerol, potassium metabisulfite, propionic acid, propyl gallate, sodium ascorbate, sodium bisulfite, sodium metabisulfite, and/or sodium sulfite. Exemplary chelating agents include ethylenediaminetetraacetic acid (EDTA), citric acid monohydrate, disodium edetate, dipotassium edetate, edetic acid, fumaric acid, malic acid, phosphoric acid, sodium edetate, tartaric acid, and/or trisodium edetate. Exemplary antimicrobial preservatives include, but are not limited to, benzalkonium chloride, benzethonium chloride, benzyl alcohol, bronopol, cetrimide, cetylpyridinium chloride, chlorhexidine, chlorobutanol, chlorocresol, chloroxylenol, cresol, ethyl alcohol, glycerin, hexetidine, imidurea, phenol, phenoxyethanol, phenylethyl alcohol, phenylmercuric nitrate, propylene glycol, and/or thimerosal. Exemplary antifungal preservatives include, but are not limited to, butyl paraben, methyl paraben, ethyl paraben, propyl paraben, benzoic acid, hydroxybenzoic acid, potassium benzoate, potassium sorbate, sodium benzoate, sodium propionate, and/or sorbic acid. Exemplary alcohol preservatives include, but are not limited to, ethanol, polyethylene glycol, phenol, phenolic compounds, bisphenol, chlorobutanol, hydroxybenzoate, and/or phenylethyl alcohol. Exemplary acidic preservatives include, but are not limited to, vitamin A, vitamin C, vitamin E, beta-carotene, citric acid, acetic acid, dehydroacetic acid, ascorbic acid, sorbic acid, and/or phytic acid. Other preservatives include, but are not limited to, tocopherol, tocopherol acetate, deteroxime mesylate, cetrimide, butylated hydroxyanisol (BHA), butylated hydroxytoluened (BHT), ethylenediamine, sodium lauryl sulfate (SLS), sodium lauryl ether sulfate (SLES), sodium bisulfite, sodium metabisulfite, potassium sulfite, potassium metabisulfite, GLYDANT PLUS®, PHENONIP®, methylparaben, GERMALL®115, GERMABEN®II, NEOLON™, KATHON™, and/or EUXYL®.

[0251] Exemplary buffering agents include, but are not limited to, citrate buffer solutions, acetate buffer solutions, phosphate buffer solutions, ammonium chloride, calcium carbonate, calcium chloride, calcium citrate, calcium glubionate, calcium gluceptate, calcium gluconate, D-gluconic acid, calcium glycerophosphate, calcium lactate, propanoic acid, calcium levulinate, pentanoic acid, dibasic calcium phosphate, phosphoric acid, tribasic calcium phosphate, calcium hydroxide phosphate, potassium acetate, potassium chloride, potassium gluconate, potassium mixtures, dibasic potassium phosphate, monobasic potassium phosphate, potassium phosphate mixtures, sodium acetate, sodium bicarbonate, sodium chloride, sodium citrate, sodium lactate, dibasic sodium phosphate, monobasic sodium phosphate, sodium phosphate mixtures, tromethamine, magnesium hydroxide, aluminum hydroxide, alginic acid, pyrogen-free water, isotonic saline, Ringer's solution, ethyl alcohol, etc., and/or combinations thereof.

[0252] Exemplary lubricating agents include, but are not limited to, magnesium stearate, calcium stearate, stearic acid, silica, talc, malt, glyceryl behanate, hydrogenated vegetable oils, polyethylene glycol, sodium benzoate, sodium acetate, sodium chloride, leucine, magnesium lauryl sulfate, sodium lauryl sulfate, etc., and combinations thereof.

[0253] Exemplary oils include, but are not limited to, almond, apricot kernel, avocado, babassu, bergamot, black current seed, borage, cade, camomile, canola, caraway, camauba, castor, cinnamon, cocoa butter, coconut, cod liver, coffee, corn, cotton seed, emu, eucalyptus, evening primrose, fish, flaxseed, geraniol, gourd, grape seed, hazel nut, hyssop, isopropyl myristate, jojoba, kukui nut, lavandin, lavender, lemon, litsea cubeba, macadamia nut, mallow, mango seed, meadowfoam seed, mink, nutmeg, olive, orange, orange roughy, palm, palm kernel, peach kernel, peanut, poppy seed, pumpkin seed, rapeseed, rice bran, rosemary, safflower, sandalwood, sasquana, savoury, sea buckthorn, sesame, shea butter, silicone, soybean, sunflower, tea tree, thistle, tsubaki, vetiver, walnut, and wheat germ oils. Exemplary oils include, but are not limited to, butyl stearate, caprylic triglyceride, capric triglyceride, cyclomethicone, diethyl sebacate, dimethicone 360, isopropyl myristate, mineral oil, octyldodecanol, oleyl alcohol, silicone oil, and/or combinations thereof.

[0254] Liquid dosage forms for oral and parenteral administration include, but are not limited to, pharmaceutically acceptable emulsions, microemulsions, solutions, suspensions, syrups, and/or elixirs. In addition to active ingredients, liquid dosage forms may comprise inert diluents commonly used in the art such as, for example, water or other solvents, solubilizing agents and emulsifiers such as ethyl alcohol, isopropyl alcohol, ethyl carbonate, ethyl acetate, benzyl alcohol, benzyl benzoate, propylene glycol, 1,3-butylene glycol, dimethylformamide, oils (in particular, cottonseed, groundnut, corn, germ, olive, castor, and sesame oils), glycerol, tetrahydrofurfuryl alcohol, polyethylene glycols and fatty acid esters of sorbitan, and mixtures thereof. Besides inert diluents, oral compositions can include adjuvants such as wetting agents, emulsifying and suspending agents, sweetening, flavoring, and/or perfuming agents. In certain embodiments for parenteral administration, compositions are mixed with solubilizing agents such a CREMOPHOR®, alcohols, oils, modified oils, glycols, polysorbates, cyclodextrins, polymers, and/or combinations thereof.

[0255] Injectable preparations, for example, sterile injectable aqueous or oleaginous suspensions may be formulated according to the known art using suitable dispersing agents, wetting agents, and/or suspending agents. Sterile injectable preparations may be sterile injectable solutions, suspensions, and/or emulsions in nontoxic parenterally acceptable diluents and/or solvents, for example, as a solution in 1,3-butanediol. Among the acceptable vehicles and solvents that may be employed are water, Ringer's solution, U.S.P., and isotonic sodium chloride solution. Sterile, fixed oils are conventionally employed as a solvent or suspending medium. For this purpose any bland fixed oil can be employed including synthetic mono- or diglycerides. Fatty acids such as oleic acid can be used in the preparation of injectables.

[0256] Injectable formulations can be sterilized, for example, by filtration through a bacterial-retaining filter, and/or by incorporating sterilizing agents in the form of sterile solid compositions which can be dissolved or dispersed in sterile water or other sterile injectable medium prior to use.

[0257] Compositions for rectal or vaginal administration are typically suppositories which can be prepared by mixing compositions with suitable non-irritating excipients such as cocoa butter, polyethylene glycol or a suppository wax which are solid at ambient temperature but liquid at body temperature and therefore melt in the rectum or vaginal cavity and release the active ingredient.

[0258] Solid dosage forms for oral administration include capsules, tablets, pills, powders, and granules. In such solid dosage forms, the active ingredient is mixed with at least one inert, pharmaceutically acceptable excipient such as sodium citrate or dicalcium phosphate and/or fillers or extenders (e.g., starches, lactose, sucrose, glucose, mannitol, and silicic acid), binders (e.g., carboxymethylcellulose, alginates, gelatin, polyvinylpyrrolidinone, sucrose, and acacia), humectants (e.g., glycerol), disintegrating agents (e.g., agar, calcium carbonate, potato starch, tapioca starch, alginic acid, certain silicates, and sodium carbonate), solution retarding agents (e.g., paraffin), absorption accelerators (e.g., quaternary ammonium compounds), wetting agents (e.g., cetyl alcohol and glycerol monostearate), absorbents (e.g., kaolin and bentonite clay), and lubricants (e.g., talc, calcium stearate, magnesium stearate, solid polyethylene glycols, sodium lauryl sulfate), and mixtures thereof. In the case of capsules, tablets and pills, the dosage form may comprise buffering agents.

[0259] Solid compositions of a similar type may be employed as fillers in soft and hard-filled gelatin capsules using such excipients as lactose or milk sugar as well as high molecular weight polyethylene glycols and the like. The solid dosage forms of tablets, dragees, capsules, pills, and granules can be prepared with coatings and shells such as enteric coatings and other coatings well known in the pharmaceutical formulating art. They may optionally comprise opacifying agents and can be of a composition that they release the active ingredient(s) only, or preferentially, in a certain part of the intestinal tract, optionally, in a delayed manner. Examples of embedding compositions which can be used include polymeric substances and waxes. Solid compositions of a similar type may be employed as fillers in soft and hard-filled gelatin capsules using such excipients as lactose or milk sugar as well as high molecular weight polyethylene glycols and the like.

[0260] Vaccine products, optionally together with plant tissue, are particularly well suited for oral administration as pharmaceutical compositions. Oral liquid formulations can be used and may be of particular utility for pediatric populations. Harvested plant material may be processed in any of a variety of ways (e.g., air drying, freeze drying, extraction etc.), depending on the properties of the desired therapeutic product and its desired form. Such compositions as described above may be ingested orally alone or ingested together with food or feed or a beverage. Compositions for oral administration include plants; extractions of plants, and proteins purified from infected plants provided as dry powders, foodstuffs, aqueous or non-aqueous solvents, suspensions, or emulsions. Examples of non-aqueous solvents are propylene glycol, polyethylene glycol, vegetable oil, fish oil, and injectable organic esters. Aqueous carriers include water, water-alcohol solutions, emulsions or suspensions, including saline and buffered medial parenteral vehicles including sodium chloride solution, Ringer's dextrose solution, dextrose plus sodium chloride solution, Ringer's solution containing lactose or fixed oils. Examples of dry powders include any plant biomass that has been dried, for example, freeze dried, air dried, or spray dried. For example, plants may be air dried by placing them in a commercial air dryer at about 120° F. until biomass contains less than 5% moisture by weight. Dried plants may be stored for further processing as bulk solids or further processed by grinding to a desired mesh sized powder. Alternatively or additionally, freeze-drying may be used for products that are sensitive to air-drying. Products may be freeze dried by placing them into a vacuum drier and dried frozen under a vacuum until the biomass contains less than about 5% moisture by weight. Dried material can be further processed as described herein.

[0261] Plant-derived material may be administered as or together with one or more herbal preparations. Useful herbal preparations include liquid and solid herbal preparations. Some examples of herbal preparations include tinctures, extracts (e.g., aqueous extracts, alcohol extracts), decoctions, dried preparations (e.g., air-dried, spray dried, frozen, or freeze-dried), powders (e.g., lyophilized powder), and liquid. Herbal preparations can be provided in any standard delivery vehicle, such as a capsule, tablet, suppository, liquid dosage, etc. Those skilled in the art will appreciate the various formulations and modalities of delivery of herbal preparations that may be applied to the present invention.

[0262] In some methods, a plant or portion thereof expressing a Plasmodium antigen polypeptide according to the present invention, or biomass thereof, is administered orally as medicinal food. Such edible compositions are typically consumed by eating raw, if in a solid form, or by drinking, if in liquid form. The plant material can be directly ingested without a prior processing step or after minimal culinary preparation. For example, a vaccine antigen may be expressed in a sprout which can be eaten directly. For instance, vaccine antigens expressed in an alfalfa sprout, mung bean sprout, or spinach or lettuce leaf sprout, etc. In some embodiments, plant biomass may be processed and the material recovered after the processing step is ingested.

[0263] Processing methods useful in accordance with the present invention are methods commonly used in the food or feed industry. Final products of such methods typically include a substantial amount of an expressed antigen and can be conveniently eaten or drunk. The final product may be mixed with other food or feed forms, such as salts, carriers, favor enhancers, antibiotics, and the like, and consumed in solid, semi-solid, suspension, emulsion, or liquid form. Such methods can include a conservation step, such as, e.g. , pasteurization, cooking, or addition of conservation and preservation agents. Any plant may be used and processed in the present invention to produce edible or drinkable plant matter. The amount of Plasmodium antigen polypeptide in a plant-derived preparation may be tested by methods standard in the art, e.g., gel electrophoresis, ELISA, or western blot analysis, using a probe or antibody specific for product. This determination may be used to standardize the amount of vaccine antigen protein ingested. For example, the amount of vaccine antigen may be determined and regulated, for example, by mixing batches of product having different levels of product so that the quantity of material to be drunk or eaten to ingest a single dose can be standardized. A contained, regulatable environment in accordance with the invention, however, should minimize the need to carry out such standardization procedures.

[0264] A vaccine protein produced in a plant cell or tissue and eaten by a subject may be preferably absorbed by the digestive system. One advantage of the ingestion of plant tissue that has been only minimally processed is to provide encapsulation or sequestration of the protein in cells of the plant. Thus, product may receive at least some protection from digestion in the upper digestive tract before reaching the gut or intestine and a higher proportion of active product would be available for uptake.

[0265] Dosage forms for topical and/or transdermal administration of a compound in accordance with this invention may include ointments, pastes, creams, lotions, gels, powders, solutions, sprays, inhalants and/or patches. Generally, the active ingredient is admixed under sterile conditions with a pharmaceutically acceptable excipient and/or any needed preservatives and/or buffers as may be required. Additionally, the present invention contemplates the use of transdermal patches, which often have the added advantage of providing controlled delivery of a compound to the body. Such dosage forms may be prepared, for example, by dissolving and/or dispensing the compound in the proper medium. Alternatively or additionally, the rate may be controlled by either providing a rate controlling membrane and/or by dispersing the compound in a polymer matrix and/or gel.

[0266] Suitable devices for use in delivering intradermal pharmaceutical compositions described herein include short needle devices such as those described in U.S. Pat. Nos. 4,886,499; 5,190,521; 5,328,483; 5,527,288; 4,270,537; 5,015,235; 5,141,496; and 5,417,662. Intradermal compositions may be administered by devices which limit the effective penetration length of a needle into the skin, such as those described in PCT publication WO 99/34850 and functional equivalents thereof. Jet injection devices which deliver liquid vaccines to the dermis via a liquid jet injector and/or via a needle which pierces the stratum corneum and produces a jet which reaches the dermis are suitable. Jet injection devices are described, for example, in U.S. Pat. Nos. 5,480,381; 5,599,302; 5,334,144; 5,993,412; 5,649,912; 5,569,189; 5,704,911; 5,383,851; 5,893,397; 5,466,220; 5,339,163; 5,312,335; 5,503,627; 5,064,413; 5,520,639; 4,596,556; 4,790,824; 4,941,880; 4,940,460; and PCT publications WO 97/37705 and WO 97/13537. Ballistic powder/particle delivery devices which use compressed gas to accelerate vaccine in powder form through the outer layers of the skin to the dermis are suitable. Alternatively or additionally, conventional syringes may be used in the classical mantoux method of intradermal administration.

[0267] Formulations suitable for topical administration include, but are not limited to, liquid and/or semi liquid preparations such as liniments, lotions, oil in water and/or water in oil emulsions such as creams, ointments and/or pastes, and/or solutions and/or suspensions. Topically administrable formulations may, for example, comprise from about 1% to about 10% (w/w) active ingredient, although the concentration of the active ingredient may be as high as the solubility limit of the active ingredient in the solvent. Formulations for topical administration may further comprise one or more of the additional ingredients described herein.

[0268] A pharmaceutical composition in accordance with the invention may be prepared, packaged, and/or sold in a formulation suitable for pulmonary administration via the buccal cavity. Such a formulation may comprise dry particles which comprise the active ingredient and which have a diameter in the range from about 0.5 nm to about 7 nm or from about 1 nm to about 6 nm. Such compositions are conveniently in the form of dry powders for administration using a device comprising a dry powder reservoir to which a stream of propellant may be directed to disperse the powder and/or using a self propelling solvent/powder dispensing container such as a device comprising the active ingredient dissolved and/or suspended in a low-boiling propellant in a sealed container. Such powders comprise particles wherein at least 98% of the particles by weight have a diameter greater than 0.5 nm and at least 95% of the particles by number have a diameter less than 7 nm. Alternatively, at least 95% of the particles by weight have a diameter greater than 1 nm and at least 90% of the particles by number have a diameter less than 6 nm. Dry powder compositions may include a solid fine powder diluent such as sugar and are conveniently provided in a unit dose form.

[0269] Low boiling propellants generally include liquid propellants having a boiling point of below 65° F. at atmospheric pressure. Generally the propellant may constitute 50% to 99.9% (w/w) of the composition, and the active ingredient may constitute 0.1% to 20% (w/w) of the composition. The propellant may further comprise additional ingredients such as a liquid non-ionic and/or solid anionic surfactant and/or a solid diluent (which may have a particle size of the same order as particles comprising the active ingredient).

[0270] Pharmaceutical compositions in accordance with the invention formulated for pulmonary delivery may provide the active ingredient in the form of droplets of a solution and/or suspension. Such formulations may be prepared, packaged, and/or sold as aqueous and/or dilute alcoholic solutions and/or suspensions, optionally sterile, comprising the active ingredient, and may conveniently be administered using any nebulization and/or atomization device. Such formulations may further comprise one or more additional ingredients including, but not limited to, a flavoring agent such as saccharin sodium, a volatile oil, a buffering agent, a surface-active agent, and/or a preservative such as methylhydroxybenzoate. The droplets provided by this route of administration may have an average diameter in the range from about 0.1 nm to about 200 nm.

[0271] Formulations described herein as being useful for pulmonary delivery are useful for intranasal delivery of a pharmaceutical composition. Another formulation suitable for intranasal administration is a coarse powder comprising the active ingredient and having an average particle from about 0.2 μm to 500 μm. Such a formulation is administered in the manner in which snuff is taken, i.e., by rapid inhalation through the nasal passage from a container of the powder held close to the nose.

[0272] Formulations suitable for nasal administration may, for example, comprise from about as little as 0.1% (w/w) and as much as 100% (w/w) of the active ingredient, and may comprise one or more of the additional ingredients described herein. A pharmaceutical composition in accordance with the invention may be prepared, packaged, and/or sold in a formulation suitable for buccal administration. Such formulations may, for example, be in the form of tablets and/or lozenges made using conventional methods, and may, for example, 0.1% to 20% (w/w) active ingredient, the balance comprising an orally dissolvable and/or degradable composition and, optionally, one or more of the additional ingredients described herein. Alternately, formulations suitable for buccal administration may comprise a powder and/or an aerosolized and/or atomized solution and/or suspension comprising the active ingredient. Such powdered, aerosolized, and/or aerosolized formulations, when dispersed, may have an average particle and/or droplet size in the range from about 0.1 nm to about 200 nm, and may further comprise one or more of the additional ingredients described herein.

[0273] A pharmaceutical composition in accordance with the invention may be prepared, packaged, and/or sold in a formulation suitable for ophthalmic administration. Such formulations may, for example, be in the form of eye drops including, for example, a 0.1/1.0% (w/w) solution and/or suspension of the active ingredient in an aqueous or oily liquid excipient. Such drops may further comprise buffering agents, salts, and/or one or more other of the additional ingredients described herein. Other opthalmically-administrable formulations which are useful include those which comprise the active ingredient in microcrystalline form and/or in a liposomal preparation. Ear drops and/or eye drops are contemplated as being within the scope of this invention.

[0274] In certain situations, it may be desirable to prolong the effect of a vaccine by slowing the absorption of one or more components of the vaccine product (e.g., protein) that is subcutaneously or intramuscularly injected. This may be accomplished by use of a liquid suspension of crystalline or amorphous material with poor water solubility. The rate of absorption of product then depends upon its rate of dissolution, which in turn, may depend upon size and form. Alternatively or additionally, delayed absorption of a parenterally administered product is accomplished by dissolving or suspending the product in an oil vehicle. Injectable depot forms are made by forming microcapsule matrices of protein in biodegradable polymers such as polylactide-polyglycolide. Depending upon the ratio of product to polymer and the nature of the particular polymer employed, rate of release can be controlled. Examples of biodegradable polymers include poly(orthoesters) and poly(anhydrides). Depot injectable formulations may be prepared by entrapping product in liposomes or microemulsions, which are compatible with body tissues. Alternative polymeric delivery vehicles can be used for oral formulations. For example, biodegradable, biocompatible polymers such as ethylene vinyl acetate, polyanhydrides, polyglycolic acid, collagen, polyorthoesters, and polylactic acid, etc., can be used. Antigen(s) or an immunogenic portions thereof may be formulated as microparticles, e.g., in combination with a polymeric delivery vehicle.

[0275] General considerations in the formulation and/or manufacture of pharmaceutical agents may be found, for example, in Remington: The Science and Practice of Pharmacy 21^{st} ed., Lippincott Williams & Wilkins, 2005.

### Administration

[0276] Among other things, present invention provides vaccines. In some embodiments, vaccines in accordance with the present invention may be administered to a subject in order to stimulate an immune response and/or confer protectivity. In some embodiments, vaccines are administered at doses comprising about 200 μg, about 150 μg, about 100 μg, about 90 μg, about 80 μg, about 70 μg, about 60 μg, about 50 μg, about 40 μg, about 35 μg, about 30 μg, about 25 μg, about 20 μg, about 15 μg, about 5 μg, about 4 μg, about 3 μg, about 2 μg, about 1 μg, about 0.1 μg, about 0.01 μg, of plant-produced Plasmodium antigen polypeptide, fusion thereof; and/or immunogenic portion thereof to a subject in need thereof. In some embodiments, the plant-produced Plasmodium antigen polypeptide, fusion thereof, and/or immunogenic portion thereof has been at least partially purified from non-antigenic components, as described herein. In some embodiments, the plant-produced Plasmodium antigen polypeptide, fusion thereof; and/or immunogenic portion thereof has not been at least partially purified from non-antigenic components, as described herein. Suitable vaccine compositions for administration to a subject are described in further detail in the section above, entitled “Vaccines.”

[0277] Plasmodium antigen polypeptides, fusions thereof, and/or immunogenic portions thereof in accordance with the invention and/or pharmaceutical compositions thereof (e.g., vaccines) may be administered using any amount and any route of administration effective for treatment.

[0278] The exact amount required will vary from subject to subject, depending on the species, age, and general condition of the subject, the severity of the infection, the particular composition, its mode of administration, its mode of activity, and the like. Plasmodium antigen polypeptides are typically formulated in dosage unit form for ease of administration and uniformity of dosage. It will be understood, however, that the total daily usage of the compositions of the present invention will be decided by the attending physician within the scope of sound medical judgment. The specific therapeutically effective dose level for any particular subject or organism will depend upon a variety of factors including the disorder being treated and the severity of the disorder; the activity of the specific Plasmodium antigen polypeptide employed; the specific pharmaceutical composition administered; the half-life of the composition after administration; the age, body weight, general health, sex, and diet of the subject; the time of administration, route of administration, and rate of excretion of the specific compound employed; the duration of the treatment; drugs used in combination or coincidental with the specific compound employed; and like factors, well known in the medical arts.

[0279] Pharmaceutical compositions of the present invention (e.g., vaccines) may be administered by any route. In some embodiments, pharmaceutical compositions of the present invention are administered by a variety of routes, including oral (PO), intravenous (IV), intramuscular (IM), intra-arterial, intramedullary, intrathecal, subcutaneous (SQ), intraventricular, transdermal, interdermal, intradermal, rectal (PR), vaginal, intraperitoneal (IP), intragastric (IG), topical (e.g., by powders, ointments, creams, gels, lotions, and/or drops), mucosal, intranasal, buccal, enteral, vitreal, sublingual; by intratracheal instillation, bronchial instillation, and/or inhalation; as an oral spray, nasal spray, and/or aerosol; and/or through a portal vein catheter. In general, the most appropriate route of administration will depend upon a variety of factors including the nature of the agent being administered (e.g., its stability in the environment of the gastrointestinal tract), the condition of the subject (e.g., whether the subject is able to tolerate a particular mode of administration), etc.

[0280] In some embodiments, vaccines in accordance with the invention are delivered by multiple routes of administration (e.g., by subcutaneous injection and by intranasal inhalation). For vaccines involving two or more doses, different doses may be administered via different routes.

[0281] In some embodiments, vaccines in accordance with the invention are delivered by subcutaneous injection. In some embodiments, vaccines in accordance with the invention are administered by intramuscular and/or intravenous injection. In some embodiments, vaccines in accordance with the invention are delivered by intranasal inhalation.

[0282] In some embodiments, vaccines in accordance with the invention are delivered by oral and/or mucosal routes. Oral and/or mucosal delivery has the potential to prevent infection of mucosal tissues, the primary gateway of infection for many pathogens. Oral and/or mucosal delivery can prime systemic immune response. There has been considerable progress in the development of heterologous expression systems for oral administration of antigens that stimulate the mucosal-immune system and can prime systemic immunity. Previous efforts at delivery of oral vaccine however, have demonstrated a requirement for considerable quantities of antigen in achieving efficacy. Thus, economical production of large quantities of target antigens is a prerequisite for creation of effective oral vaccines. Development of plants expressing antigens, including thermostable antigens, represents a more realistic approach to such difficulties.

[0283] In certain embodiments, a Plasmodium antigen polypeptide expressed in a plant or portion thereof is administered to a subject orally by direct administration of a plant to a subject. In some aspects a vaccine protein expressed in a plant or portion thereof is extracted and/or purified, and used for the preparation of a pharmaceutical composition. It may be desirable to formulate such isolated products for their intended use (e.g., as a pharmaceutical agent, vaccine composition, etc.). In some embodiments, it will be desirable to formulate products together with some or all of plant tissues that express them.

[0284] In certain embodiments, a Plasmodium antigen polypeptide expressed in a plant or portion thereof is administered to a subject orally by direct administration of a plant to a subject. In some aspects a vaccine protein expressed in a plant or portion thereof is extracted and/or purified, and used for preparation of a pharmaceutical composition. It may be desirable to formulate such isolated products for their intended use (e.g., as a pharmaceutical agent, vaccine composition, etc.). In some embodiments, it will be desirable to formulate products together with some or all of plant tissues that express them.

[0285] A vaccine protein produced in a plant cell or tissue and eaten by a subject may be preferably absorbed by the digestive system. One advantage of the ingestion of plant tissue that has been only minimally processed is to provide encapsulation or sequestration of the protein in cells of the plant. Thus, product may receive at least some protection from digestion in the upper digestive tract before reaching the gut or intestine and a higher proportion of active product would be available for uptake.

[0286] Where it is desirable to formulate product together with plant material, it will often be desirable to have utilized a plant that is not toxic to the relevant recipient (e.g., a human or other animal). Relevant plant tissue (e.g., cells, roots, leaves) may simply be harvested and processed according to techniques known in the art, with due consideration to maintaining activity of the expressed product. In certain embodiments, it is desirable to have expressed Plasmodium antigen polypeptide in an edible plant (and, specifically in edible portions of the plant) so that the material can subsequently be eaten. For instance, where vaccine antigen is active after oral delivery (when properly formulated), it may be desirable to produce antigen protein in an edible plant portion, and to formulate expressed Plasmodium antigen polypeptide for oral delivery together with some or all of the plant material with which a protein was expressed.

[0287] In certain embodiments, Plasmodium antigen polypeptides in accordance with the present invention and/or pharmaceutical compositions thereof (e.g., vaccines) in accordance with the invention may be administered at dosage levels sufficient to deliver from about 0.001 mg/kg to about 100 mg/kg, from about 0.01 mg/kg to about 50 mg/kg, from about 0.1 mg/kg to about 40 mg/kg, from about 0.5 mg/kg to about 30 mg/kg, from about 0.01 mg/kg to about 10 mg/kg, from about 0.1 mg/kg to about 10 mg/kg, or from about 1 mg/kg to about 25 mg/kg of subject body weight per day to obtain the desired therapeutic effect. The desired dosage may be delivered more than three times per day, three times per day, two times per day, once per day, every other day, every third day, every week, every two weeks, every three weeks, every four weeks, every two months, every six months, or every twelve months. In certain embodiments, the desired dosage may be delivered using multiple administrations (e.g., two, three, four, five, six, seven, eight, nine, ten, eleven, twelve, thirteen, fourteen, or more administrations).

[0288] Compositions are administered in such amounts and for such time as is necessary to achieve the desired result. In certain embodiments, a “therapeutically effective amount” of a pharmaceutical composition is that amount effective for treating, attenuating, or preventing a disease in a subject. Thus, the “amount effective to treat, attenuate, or prevent disease,” as used herein, refers to a nontoxic but sufficient amount of the pharmaceutical composition to treat, attenuate, or prevent disease in any subject. For example, the “therapeutically effective amount” can be an amount to treat, attenuate, or prevent infection (e.g., Plasmodium infection), etc.

[0289] It will be appreciated that Plasmodium antigen polypeptides in accordance with the present invention and/or pharmaceutical compositions thereof can be employed in combination therapies. The particular combination of therapies (e.g., therapeutics or procedures) to employ in a combination regimen will take into account compatibility of the desired therapeutics and/or procedures and the desired therapeutic effect to be achieved. It will be appreciated that the therapies employed may achieve a desired effect for the same purpose (for example, Plasmodium antigen polypeptides useful for treating, preventing, and/or delaying the onset of Plasmodium infection may be administered concurrently with another agent useful for treating, preventing, and/or delaying the onset of Plasmodium infection), or they may achieve different effects (e.g., control of any adverse effects). The invention encompasses the delivery of pharmaceutical compositions in combination with agents that may improve their bioavailability, reduce and/or modify their metabolism, inhibit their excretion, and/or modify their distribution within the body.

[0290] Pharmaceutical compositions in accordance with the present invention may be administered either alone or in combination with one or more other therapeutic agents. By “in combination with,” it is not intended to imply that the agents must be administered at the same time and/or formulated for delivery together, although these methods of delivery are within the scope of the invention. Compositions can be administered concurrently with, prior to, or subsequent to, one or more other desired therapeutics or medical procedures. In will be appreciated that therapeutically active agents utilized in combination may be administered together in a single composition or administered separately in different compositions. In general, each agent will be administered at a dose and/or on a time schedule determined for that agent.

[0291] In general, it is expected that agents utilized in combination with be utilized at levels that do not exceed the levels at which they are utilized individually. In some embodiments, the levels utilized in combination will be lower than those utilized individually.

[0292] In certain embodiments, vaccine compositions comprising at least one Plasmodium antigen polypeptide are administered in combination with other Plasmodium vaccines. In certain embodiments, vaccine compositions comprising at least one Plasmodium antigen polypeptide are administered in combination with other Plasmodium therapeutics. In certain embodiments, vaccine compositions comprising at least one Plasmodium antigen polypeptide are administered in combination with one or more alkaloids (e.g., quinine, quinimax, quinidine, cinchoine, cinchonidine, mefloquine, halofantrine, etc.); chloroquine; amodiaquine; nivaquine; sulfa drugs; pyrimethamine; sulphadoxine; proguanil; atovaquone; primaquine; artemesinin; artemesinin derivatives (e.g., artemether, artesunate, arteether, dihydroartemisinin, etc.); antibiotics (e.g., doxycycline, clindamycin, etc.); malarone; dapsone; and/or combinations thereof.

### Kits

[0293] hi one aspect, the present invention provides a pharmaceutical pack or kit including Plasmodium polypeptides according to the present invention. In certain embodiments, pharmaceutical packs or kits include plants, plant cells, and/or plant tissues producing a Plasmodium polypeptide according to the present invention, or preparations, extracts, or pharmaceutical compositions containing vaccine in one or more containers filled with optionally one or more additional ingredients of pharmaceutical compositions in accordance with the invention. In some embodiments, pharmaceutical packs or kits include pharmaceutical compositions comprising purified Plasmodium polypeptides according to the present invention, in one or more containers optionally filled with one or more additional ingredients of pharmaceutical compositions in accordance with the invention. In certain embodiments, the pharmaceutical pack or kit includes an additional approved therapeutic agent (e.g., Plasmodium polypeptide, Plasmodium vaccine, Plasmodium therapeutic) for use as a combination therapy. Optionally associated with such container(s) can be a notice in the form prescribed by a governmental agency regulating the manufacture, use or sale of pharmaceutical products, which notice reflects approval by the agency of manufacture, use, or sale for human administration.

[0294] Kits are provided that include therapeutic and/or prophylactic reagents. As but one non-limiting example, a Plasmodium vaccine can be provided (e.g., as an oral, injectable, and/or intranasal formulation) and administered as therapy. Pharmaceutical doses or instructions therefor may be provided in the kit for administration to an individual suffering from or at risk for Plasmodium parasite infection.

[0295] Provided herein are vaccine compositions comprising: a plant-produced Plasmodium polypeptide antigen; and a pharmaceutically acceptable excipient; wherein the vaccine composition elicits an immune response upon administration to a subject. In some embodiments, the plant-produced Plasmodium polypeptide antigen is a Pfs25, Pfs28, Pfs48/45, or Pfs230 polypeptide. In some embodiments, the plant-produced Plasmodium polypeptide antigen has a sequence as set forth in any one of the polypeptides presented in FIG. 1. The plant-produced Plasmodium polypeptide antigen can be purified from plant materials. The plant-produced Plasmodium polypeptide antigen can be about 70% pure; about 80% pure; about 90% pure; about 95% pure; about 99% pure. In some embodiments, the plant-produced Plasmodium polypeptide antigen is not purified from plant materials and can be administered to a subject as a whole plant or plant extract.

[0296] In some embodiments, the vaccine composition further comprises at least one vaccine adjuvant. The adjuvant can be selected from the group consisting of alum, Quil A, QS21, aluminum hydroxide, aluminum phosphate, mineral oil, MF59, Malp2, incomplete Freund's adjuvant, complete Freund's adjuvant, alhydrogel, 3 De-O-acylated monophosphoryl lipid A (3D-MPL), lipid A, Bortadella pertussis, Mycobacterium tuberculosis, Merck Adjuvant 65, squalene, virosomes, SBAS2, SBAS1, and unmethylated CpG sequences.

[0297] In some embodiments, the Plasmodium polypeptide antigen can be produced in a transgenic plant or a plant transiently expressing the antigen. The antigen can expressed in the plant from a launch vector.

[0298] Also provided are methods for inducing a protective immune response against Plasmodium infection in a subject comprising administering to a subject an effective amount of a vaccine composition. The composition can administered orally, intranasally, subcutaneously, intravenously, intraperitoneally, or intramuscularly. The composition can be administered orally via feeding plant cells to the subject. The subject can be human; in some embodiments, subject is a bird, a pig, or a horse.

[0299] Also provided are methods for producing a Plasmodium antigen polypeptide comprising: preparing a nucleic acid construct encoding a Plasmodium antigen polypeptide; introducing the nucleic acid of step a into a plant cell; and incubating the plant cell under conditions favorable for expression of the Plasmodium antigen polypeptide; thereby producing the Plasmodium antigen polypeptide. The expression of the antigen protein can be under control of a viral promoter; the nucleic acid construct can further comprise vector nucleic acid sequence. The vector can be a binary vector and the nucleic acid construct can further comprise sequences encoding viral proteins. The plant cell can be selected from the group consisting of alfalfa, radish, mustard, mung bean, broccoli, watercress, soybean, wheat sunflower, cabbage, clover, petunia, tomato, potato, nicotine, spinach, and lentil cell. The plant cell is of a genus selected from the Brassica genus, the Nicotiana genus, and the Petunia genus. The Plasmodium antigen polypeptide can be produced in sprouted seedlings. Some embodiments further comprise recovering partially purified or purified Plasmodium antigen polypeptide which is produced.

[0300] Also provided are isolated nucleic acid constructs comprising nucleic acid sequence encoding a Plasmodium antigen polypeptide, wherein the plant-produced Plasmodium polypeptide antigen has a sequence as set forth in any one of the polypeptides presented in FIG. 1. The isolated nucleic acid construct can further comprise vector nucleic acid sequences and viral promoter nucleic acid sequence. The vector can be a binary vector and can further comprise nucleic acid sequences encoding viral proteins.

[0301] Also provided are host cells comprising the nucleic acid constructs. The host cell can be a plant cell. The plant cell can be selected from the group consisting of alfalfa, radish, mustard, mung bean, broccoli, watercress, soybean, wheat sunflower, cabbage, clover, petunia, tomato, potato, nicotine, spinach, and lentil. The plant cell can be a genus selected from the Brassica genus, the Nicotiana genus, and the Petunia genus.

[0302] The representative examples that follow are intended to help illustrate the invention, and are not intended to, nor should they be construed to, limit the scope of the invention. Indeed, various modifications of the invention and many further embodiments thereof, in addition to those shown and described herein, will become apparent to those skilled in the art from the full contents of this document, including the examples which follow and the references to the scientific and patent literature cited herein. The following examples contain information, exemplification and guidance, which can be adapted to the practice of this invention in its various embodiments and the equivalents thereof.

### Exemplification

### EXAMPLE 1

### Recombinant Pfs25, Pfs28, Pfs48/45, and Pfs230 antigens from Plasmodium falciparum

[0303] Recombinant Pfs25, Pfs28, Pfs48/45, and Pfs230 antigens from Plasmodium falciparum were produced in plants. Plasmodium antigens were cloned into the “launch vector” system (see, e.g., Musiychuk et al., 2007, Plasmodium and Other Respiratory Viruses, 1:19-25; and PCT Publication WO 07/095304; both of which are incorporated herein by reference), specifically into vector pGR-D4A4.

[0304] Launch vectors were then introduced into Agrobacterium and vacuum infiltrated into Nicotiana benthamiana. Antigens were allowed to express and accumulate in the plant biomass for a period of time (e.g., 3-7 days prior to harvesting).

[0305] Recombinant antigens were purified from the plant biomass (FIG. 7), essentially as follows. Plant cells were lysed in 50 mM NaPi, pH 8.0, 0.5 M NaCl, and 20 mM imidazole. Triton was added to a final concentration of 0.5% and incubated for 20 minutes at 4° C. Extracts were spun for 30 minutes at 78,000×g at 4° C. or for 40 minutes at 4° C. at 48,000×g. Supernatant was filtered through Miracloth prior to loading on Ni-NTA columns. In some instances, an optional additional clarification was performed, utilizing TFF (tangential flow filtration) microfiltration step (0.1 μm-0.2 μm pore size). Cleared extracts were loaded onto a Ni-NTA column (pre-equilibrated with lysis buffer), and the columns were washed thoroughly with Buffer A (50 mM NaPi, pH 7.5, 0.5 M NaCl, 20 mM imidazole, and 0.5% Triton) followed by a wash with Buffer Al (same as Buffer A without the Triton). Proteins were eluted with imidazole. Eluted proteins were optionally further purified using anion exchange chromatography (Q Column) or ultrafiltration.

[0306] FIGS. 8 and 9 present exemplary expression data for chimeric virus particles.

[0307] FIGS. 10-12 describe purification of chimeric virus particles.

### EXAMPLE 2

### Materials and Methods

[0308] Recombinant Pfs constructs. Pfs polypeptides Pfs25, Pfs28, Pfs48/45 and Pfs230 or portions thereof were inserted into the binary launch vector, pGR-D4 shown in FIG. 13 and as described in Example 1. Some Pfs polypeptides or portions thereof were expressed as fusion proteins to the modified lichenase of SEQ ID NO: 40. The Pfs polypetides were introduced into the lichenase gene such that the fusion was at the N-terminus, C-terminus or an internal loop region of the lichenase amino acid sequence. A graphical representation of the relevant cloning sites and nomenclature is shown in FIG. 14.

[0309] Over 70 different constructs were generated, either as full-length sequences, full-length sequences fused to lichenase or protions of Pfs sequences fused to lichenase. Some constructs also included mutations in one or more glycosylation sites. The number of constucts generated for each gene included: 14 constructs for Pfs25; 6 constructs for Pfs28; 25 constructs for Pfs48/45; and 22 constructs for Pfs230.

[0310] Immunization of Mice with Pfs antigens. Groups of eight-week old Balb/c mice, six mice per group, were immunized with Pfs antigens subcutaneously on days 0 and 28 with 50 ug of antigen per dose. Animals in control groups received PBS. All immunizations were performed with the addition of 10 μg of Quil A (Accurate Chemical, Westbury, N.Y.). Serum samples were collected prior to each immunization and four weeks after the second dose. Specific antibody titers were measured by ELISA.

[0311] Dry Immunofluorescence Assay (IFA) and Suspension Immunofluorescence Assay (SIFA). For the IFA, parasites were dried on to slides and probed with sera collected from mice that had been immunized with recombinant Pfs polypeptides. For the SIFA, parasites and sera were incubated together in solutions and then dried on to slides for analysis. Fluorescent secondary antibodies were used for detection for both assays.

[0312] For analysis of Pfs25, Pfs48/45 and Pfs230, the IFA and SIFA were done with parasites 3 hours after activation. Mature gametocytes (day 14 culture) were activated with fetal calf serum in vitro for 3 hours. One portion of the activated culture was put on IFA slides, dried and stored at −80 C until use. The other portion of the activated culture was divided in tubes (about 10⁵ parasites/tube) and incubated directly with the sera from immunized mice (SIFA). After 30 minutes, the parasites were washed and incubated with ALEXA anti-mouse conjugate. Pfs25 was detectable about 2-3 hours after activation on the surface of round macrogametes/zygotes. For Pfs28 reactivity, the mature gametocytes were fed to the mosquitoes as below and the next day the parasites were removed from the midgut and incubated directly with the sera from immunized mice (SIFA). After 30 minutes incubation, the parasites were washed and incubated with ALEXA anti-mouse conjugate.

[0313] All sera from mice immunized with Pfs28 (and also Pfs25) were positive with the parasites 24 hours after activation in the mosquito midgut.

[0314] Standard Membrane Feeding Assay. The transmission-blocking efficacy of antibodies from immunized animals was tested in a standard membrane-feeding assay (SMFA) essentially as described in “Evaluation of the standard membrane feeding assay (SMFA) for the determination of malaria transmission-reducing activity using empirical data”, van der Kolk M, De Vlas S J, Saul A, van de Vegte-Bolmer M, Eling W M, Sauerwein R W., et al., Parasitology. 2005 January; 130(Pt 1):13-22 (Erratum in: Parasitology 2005 October; 131(Pt 4):578. [Sauerwein, W corrected to Sauerwein, RW]) and “Measurement by membrane feeding of reduction in Plasmodium falciparum transmission induced by endemic sera”, Lensen A, van Druten J, Bolmer M, van Gernert G, Eling W, Sauerwein R., Trans R Soc Trop Med Hyg. 1996 January-February; 90(1):20-2, which are herein incorporated by reference. Briefly, laboratory-reared Anopheles stephensi mosquitoes were allowed to take a blood meal from membrane-covered devices that contained serum from the above-immunized mice combined with complement and red blood cell suspensions infected with P. falciparum gametocytes. After one week the number of infected mosquitoes, as well as the number of developed oocysts per mosquito was determined. Transmission reducing activity (TRA) was calculated by comparing oocyst numbers in mosquitoes that were fed with test versus control sera. SMFA was conducted using samples collected at day zero (pre-immune) and day 40 (12 days after the third dose).

### EXAMPLE 3

### Protein Production of Malarial Antigens

[0315] Recombinant Pfs antigens were produced in plants and purified as described according to Example 1 and analyzed by SDS polyacrylamide gel electrophoresis. Coomassie blue stained gels for 25MF1E, 25MF2E, 28F2E, 48F1E, 230D2M-2E, 230D4M-2E, 230D4M-2E are shown in FIG. 15.

### EXAMPLE 4

### Analysis of Pfs25 Constructs

[0316] The expression levels and solubility profiles for sixteen different plant-produced Pfs25 and Pfs28 antigens are shown in FIG. 16. All samples were soluble. The expression levels ranged from 290 mg/kg of plant biomass to about 2666 mg/kg of plant biomass.

[0317] Selected antigens from FIG. 16 were used to immunize mice as described in Example 2. Sera were collected and tested in IFA, SIFA and SMFA assays. The results of these assays are shown in the table in FIG. 17. All sera were that were tested in the IFA and SIFA showed specific parasite binding. Sera from mice immunized with Pfs25 constucts (25F2E, 25MF1E, 25MF2E, 25MF3E, 25-2-25-3 and 25-2-25M-3) significantly reduced the final oocyst counts in the SMFA as compared to sera from PBS control injected animals.

### EXAMPLE 5

### Analysis of Pfs28 Constructs

[0318] Selected antigens from FIG. 16 were used to immunize mice as described in Example 2. Sera were collected and tested in IFA, SIFA and SMFA assays. The results of these assays are shown in the table in FIG. 18. Sera from mice immunized with Pfs28 constucts 28-2-25-3 and 28-2-25M-3 showed specific parasite binding in the IFA and SIFA.

### EXAMPLE 6

### Analysis of Pfs48/45 Constructs

[0319] The expression levels and solubility profiles for eleven different plant-produced Pfs48/45 antigens are shown in FIG. 19. All samples were either soluble or partially soluble. The expression levels ranged from 265 mg/kg of plant biomass to about 1212 mg/kg of plant biomass.

[0320] Selected Pfs48/45 antigens were used to immunize mice as described in Example 2. Sera were collected and tested in IFA, SIFA and SMFA assays. The results of these assays are shown in the table in FIG. 20. All sera from mice immunized with Pfs48/45 constucts, except for 48F3E, 48D2-2E, 48D2M-2E and 48D1-2E173, showed showed weak but specific parasite binding in the IFA; sera from mice immunized with Pfs48/45 constucts 48F1E, 48MF3E, 48D1M-2E, 48D1-2E173, 48D1-1E173 showed specific parasite binding in the IFA and parasite binding in the SIFA; Sera from mice immunized with Pfs48/45 constucts 48F2E, 48D1-2E, 48D2-2E reduced the final oocyst counts in the SMFA as compared to sera from PBS control injected animals.

### EXAMPLE 7

### Analysis of Pfs230 Constructs

[0321] The expression levels and solubility profiles for four different plant-produced Pfs230 antigens are shown in FIG. 21. All samples were soluble. The expression levels ranged from 163 mg/kg of plant biomass to about 848 mg/kg of plant biomass.

[0322] Pfs230 antigens were used to immunize mice as described in Example 2. Sera were collected and tested in IFA, SIFA and SMFA assays. The results of these assays are shown in the table in FIG. 22. Sera from mice immunized with the Pfs230 constucts, 230A showed specific parasite binding in the IFA and SIFA. Sera from mice immunized with 230D4M-3E reduced the final oocyst counts in the SMFA as compared to sera from PBS control injected animals; sera from mice immunized with 230A showed a partial reduction.

### EXAMPLE 8

### Effect of Alhydrogel on Immunogenicity of Pfs230

[0323] The effect of Alhydrogel on immunogenicity of Pfs230A was assayed essentially according to the methods described in Example 2. Serum samples were collected prior to each injection and assayed for Pfs23A specific IgG isotypes. The results of this experiment are shown in FIGS. 23A and 23B. As indicated,in the presence of both Alhydrogel (FIG. 23A) and Quil A (FIG. 23B) the predominant IgG isotype was IgG1. Quil A induced more IgG2a and IgG2b antibodies than did Alhydrogel, but not enough to induce complement fixation and parasite reduction.

### Equivalents and Scope

[0324] Those skilled in the art will recognize, or be able to ascertain using no more than routine experimentation, many equivalents to the specific embodiments of the invention, described herein. The scope of the present invention is not intended to be limited to the above Description, but rather is as set forth in the appended claims.

[0325] Those skilled in the art will recognize, or be able to ascertain using no more than routine experimentation, many equivalents to the specific embodiments of the invention described herein. The scope of the present invention is not intended to be limited to the above Description, but rather is as set forth in the appended claims.

[0326] In the claims articles such as “a,” “an,” and “the” may mean one or more than one unless indicated to the contrary or otherwise evident from the context. Claims or descriptions that include “or” between one or more members of a group are considered satisfied if one, more than one, or all of the group members are present in, employed in, or otherwise relevant to a given product or process unless indicated to the contrary or otherwise evident from the context. The invention includes embodiments in which exactly one member of the group is present in, employed in, or otherwise relevant to a given product or process. The invention includes embodiments in which more than one, or all of the group members are present in, employed in, or otherwise relevant to a given product or process. Furthermore, it is to be understood that the invention encompasses all variations, combinations, and permutations in which one or more limitations, elements, clauses, descriptive terms, etc., from one or more of the listed claims is introduced into another claim. For example, any claim that is dependent on another claim can be modified to include one or more limitations found in any other claim that is dependent on the same base claim. Furthermore, where the claims recite a composition, it is to be understood that methods of using the composition for any of the purposes disclosed herein are included, and methods of making the composition according to any of the methods of making disclosed herein or other methods known in the art are included, unless otherwise indicated or unless it would be evident to one of ordinary skill in the art that a contradiction or inconsistency would arise.

[0327] Where elements are presented as lists, e.g., in Markush group format, it is to be understood that each subgroup of the elements is also disclosed, and any element(s) can be removed from the group. It should it be understood that, in general, where the invention, or aspects of the invention, is/are referred to as comprising particular elements, features, etc., certain embodiments of the invention or aspects of the invention consist, or consist essentially of, such elements, features, etc. For purposes of simplicity those embodiments have not been specifically set forth in haec verba herein. It is noted that the term “comprising” is intended to be open and permits the inclusion of additional elements or steps.

[0328] Where ranges are given, endpoints are included. Furthermore, it is to be understood that unless otherwise indicated or otherwise evident from the context and understanding of one of ordinary skill in the art, values that are expressed as ranges can assume any specific value or subrange within the stated ranges in different embodiments of the invention, to the tenth of the unit of the lower limit of the range, unless the context clearly dictates otherwise.

[0329] As used in the specification and the appended claims, the singular forms “a,” “an” and “the” include plural referents unless the context clearly dictates otherwise.

[0330] In addition, it is to be understood that any particular embodiment of the present invention that falls within the prior art may be explicitly excluded from any one or more of the claims. Since such embodiments are deemed to be known to one of ordinary skill in the art, they may be excluded even if the exclusion is not set forth explicitly herein. Any particular embodiment of the compositions of the invention (e.g., any Plasmodium species, strain, etc.; any Plasmodium polypeptide antigen; any expression system; any plant production system; any method of administration; etc.) can be excluded from any one or more claims, for any reason, whether or not related to the existence of prior art.

[0331] All references cited herein are incorporated by reference. A number of embodiments of the invention have been described. Nevertheless, it will be understood that various modifications may be made without departing from the spirit and scope of the invention. Accordingly, other embodiments are within the scope of the following claims.

1. An isolated fusion protein comprising a thermostable protein and a Plasmodium polypeptide, wherein the Plasmodium polypeptide is a Pfs25, Pfs28, Pfs48/45, or Pfs230 polypeptide or immunogenic portion thereof, and wherein the fusion protein, when administered to a subject, induces or enhances a transmission blocking immune response against the Plasmodium polypeptide.

2. The fusion protein of claim 1, wherein the thermostable protein is a lichenase polypeptide.

3. The fusion protein of claim 2, wherein the lichenase polypeptide is a modified lichenase B polypeptide having at least 90% sequence identity SEQ ID NO: 40.

4-7. (canceled)

8. The fusion protein of claim 1, wherein the Plasmodium polypeptide is a Pfs25 polypeptide having at least 90% sequence identity to SEQ ID NO: 42.

9-12. (canceled)

13. The fusion protein of claim 1, wherein the Plasmodium polypeptide is a Pfs28 polypeptide having at least 90% sequence identity to SEQ ID NO: 55.

14-17. (canceled)

18. The fusion protein of claim 1, wherein the Plasmodium polypeptide is a Pfs48/45 polypeptide having at least 90% sequence identity to SEQ ID NO: 62.

19-22. (canceled)

23. The fusion protein of claim 1, wherein the Plasmodium polypeptide is a Pfs230 polypeptide having at least 90% sequence identity to SEQ ID NO: 95.

24-27. (canceled)

28. A fusion protein comprising a polypeptide having sequence identity of at least 90% to an amino acid sequence selected from the group consisting of SEQ ID NOs: 152, 154, 156, 158, 160, 162, 164, 166, 168, 170, 172, 174, 176, 178, 180, 182, 184, 186, 188, 190, 192, 194, 196, 198, 200, 202, 204, 206, 208, 210, 212, 214, 216, 218, 220, 224, 226, 228, 230, 232, 234, 236, 238, 240, 242, 244, 246, 248, 250, 252, and 254.

29-32. (canceled)

33. A nucleic acid comprising a sequence encoding the fusion protein of claim 1.

34. An expression vector comprising the nucleic acid of claim 33.

35. The expression vector of claim 34, further comprising a sequence encoding a signal sequence.

36. The expression vector of claim 34, wherein the expression vector is an Agrobacterial plasmid, a plant viral vector or a plant viral vector cloned into an Agrobacterial plasmid.

37. A host cell comprising the expression vector of claim 34.

38. The host cell of claim 37, wherein the host cell is a plant cell.

39. A plant comprising the plant cell of claim 38.

40. A pharmaceutical composition comprising the fusion protein of claim 1 and a pharmaceutically acceptable carrier or excipient.

41. A method of inducing or enhancing a transmission blocking immune response against a Plasmodium polypeptide in a subject, wherein the Plasmodium polypeptide is a Pfs25, Pfs28, Pfs48/45, or Pfs230 polypeptide, the method comprising administering to the subject an effective amount of the pharmaceutical composition of claim 40.

42. A method of producing the fusion protein of claim 1, the method comprising:
(a) providing a nucleic acid construct comprising a nucleic acid encoding the fusion protein;
(b) introducing the nucleic acid construct into a plant cell; and
(c) maintaining the cell under conditions permitting expression of the fusion protein.

43. A method of making a composition that induces or enhances an immune response against a Plasmodium polypeptide, wherein the Plasmodium polypeptide is a Pfs25, Pfs28, Pfs48/45, or Pfs230 polypeptide, the method comprising:
a) producing the fusion protein of claim 1 in a plant;
b) isolating the fusion protein; and
c) combining the fusion protein of step (b) with a pharmaceutically acceptable carrier.

44. A method of making a composition that induces or enhances a transmission blocking immune response against a Plasmodium polypeptide, wherein the Plasmodium polypeptide is a Pfs25, Pfs28, Pfs48/45, or Pfs230 polypeptide or immunogenic portion thereof, the method comprising:
a) producing the Plasmodium polypeptide in a plant;
b) isolating the polypeptide; and
c) combining the polypeptide with a pharmaceutically acceptable carrier.

45. The method of claim 44, wherein the Plasmodium polypeptide is a Pfs25 polypeptide having at least 90% sequence identity to SEQ ID NO: 42.

46. (canceled)

47. The method of claim 44, wherein the Plasmodium polypeptide is a Pfs28 polypeptide having at least 90% sequence identity to SEQ ID NO: 55.

48. (canceled)

49. The method of claim 44, wherein the Plasmodium polypeptide is a Pfs48/45 polypeptide having at least 90% sequence identity to SEQ ID NO: 62.

50. (canceled)

51. The method of claim 44, wherein the Plasmodium polypeptide is a Pfs230 polypeptide having at least 90% sequence identity to SEQ ID NO: 95.

52. (canceled)

53. The method of claim 42, wherein the plant cell transiently expresses the fusion protein.

54. The method of claim 53, wherein the transient expression is from an Agrobacterial plasmid, a plant viral vector, or a plant viral vector is cloned into an Agrobacterial plasmid.

55. The method of claim 42, wherein the plant cell is transgenic for the polypeptide.

56. The method of claim 43, further comprising combining the composition with at least one adjuvant.

57. The method of claim 56, wherein the adjuvant is selected from the group consisting of alum, Quil A, QS21, aluminum hydroxide, aluminum phosphate, mineral oil, MF59, Malp2, incomplete Freund's adjuvant, complete Freund's adjuvant, alhydrogel, 3 De-O-acylated monophosphoryl lipid A (3D-MPL), lipid A, Bortadella pertussis, Mycobacterium tuberculosis, Merck Adjuvant 65, squalene, virosomes, SBAS2, SBAS1, AS03 and unmethylated CpG sequences.

58. A method of producing a Plasmodium polypeptide, wherein the Plasmodium polypeptide is a Pfs25, Pfs28, Pfs48/45, or Pfs230 polypeptide or immunogenic portion thereof, the method comprising:
(a) providing a nucleic acid construct comprising a nucleic acid encoding the Plasmodium polypeptide;
(b) introducing the nucleic acid into a plant cell; and
(c) maintaining the cell under conditions permitting expression of the polypeptide.

59. The method of claim 58, wherein the Plasmodium polypeptide is a Pfs25 polypeptide having at least 90% sequence identity to SEQ ID NO: 42.

60. (canceled)

61. The method of claim 58, wherein the Plasmodium polypeptide is a Pfs28 polypeptide having at least 90% sequence identity to SEQ ID NO: 55.

62. (canceled)

63. The method of claim 58, wherein the Plasmodium polypeptide is a Pfs48/45 polypeptide having at least 90% sequence identity to SEQ ID NO: 62.

64. (canceled)

65. The method of claim 58, wherein the Plasmodium polypeptide is a Pfs230 polypeptide having at least 90% sequence identity to SEQ ID NO: 95.

66. (canceled)

67. The method of claim 42, wherein the plant cell is from a plant of a genus selected from the group consisting of Brassica, Nicotiana, Petunia, Lycopersicon, Solanum, Capsium, Daucus, Apium, Lactuca, Sinapis or Arabidopsis.

68. The method of claim 42, wherein the plant cell is from a plant of a species selected from the group consisting of Nicotiana benthamiana, Brassica carinata, Brassica juncea, Brassica napus, Brassica nigra, Brassica oleraceae, Brassica tournifortii, Sinapis alba, and Raphanus sativus.

69. The method of claim 42, wherein the plant cell is from a plant selected from the group consisting of alfalfa, radish, mustard, mung bean, broccoli, watercress, soybean, wheat, sunflower, cabbage, clover, petunia, tomato, potato, tobacco, spinach, and lentil.

70. The method of claim 42, wherein the plant cell is from a sprouted seedling.

71. The method of claim 43, wherein step (a) is performed by the method of claim 58.

72. A Plasmodium polypeptide produced by the method of claim 58.

73. A plant comprising the Plasmodium polypeptide of claim 72.

74. A method of inducing or enhancing an immune response against a Plasmodium polypeptide in a subject, the method comprising administering a fusion protein produced by the method of claim 42 to a subject.

75. A method of inducing or enhancing an immune response against a Plasmodium polypeptide in a subject, the method comprising administering to the subject a therapeutically effective amount of the composition produced by the method of claim 43.

76. The method of claim 75, wherein the composition is administered orally, intranasally, subcutaneously, intravenously, intraperitoneally, or intramuscularly.

77-78. (canceled)

79. A method of protecting a population of subjects from Plasmodium infection, the method comprising administering to one or more subjects in the population an effective amount of the composition of claim 40.

80. A method of reducing transmission of Plasmodium in a population of subjects, the method comprising administering to one or more subjects in the population an effective amount of the composition of claim 40.

81-84. (canceled)

85. The method of claim 44, wherein the Pfs25, Pfs28, Pfs48/45, or Pfs230 polypeptide or immunogenic portion thereof is fused to a thermostable protein.

The application's sequence listing, which the Patent Office published only in electronic form, follows.

SEQUENCE LISTING (265 sequences)

SEQ ID NO: 1 - protein, 333 aa, Clostridium thermocellum
MKNRVISLLMASLLLVLSVIVAPFYKAEAATVVNTPFVAVFSNFDSSQWEADWANGSVFNCVWKPSQVTFSNGKMILTLDREYGGSYPYKSGEYRTKSFFGYGYYEVRMKAAKNVGIVSSFFTYTGPSDNNPWDEIDIEFLGKDTTKVQFNWYKNGVGGNEYLHNLGFDASQDFHTYGFEWRPDYIDFYVDGKKVYRGTRNIPVTPGKIMMNLWPGIGVDEWLGRYDGRTPLQAEYEYVKYYPNGVPQDNPTPTPTIAPSTPTNPNLPLKGDVNGDGHVNSSDYSLFKRYLLRVIDRFPVGDQSVADVNRDGRIDSTDLTMLKRYLIRAIPSL

SEQ ID NO: 2 - protein, 259 aa, Brevibacillus brevis
MVKSKYLVFISVFSLLFGVFVVGFSHQGVKAEEERPMGTAFYESFDAFDDERWSKAGVWTNGQMFNATWYPEQVTADGLMRLTIAKKTTSARNYKAGELRTNDFYHYGLFEVSMKPAKVEGTVSSFFTYTGEWDWDGDPWDEIDIEFLGKDTTRIQFNYFTNGVGGNEFYYDLGFDASESFNTYAFEWREDSITWYVNGEAVHTATENIPQTPQKIMMNLWPGVGVDGWTGVFDGDNTPVYSYYDWVRYTPLQNYQIHQ

SEQ ID NO: 3 - protein, 349 aa, Fibrobacter succinogenes
MNIKKTAVKSALAVAAAAAALTTNVSAKDFSGAELYTLEEVQYGKFEARMKMAAASGTVSSMFLYQNGSEIADGRPWVEVDIEVLGKNPGSFQSNIITGKAGAQKTSEKHHAVSPAADQAFHTYGLEWTPNYVRWTVDGQEVRKTEGGQVSNLTGTQGLRFNLWSSESAAWVGQFDESKLPLFQFINWVKVYKYTPGQGEGGSDFTLDWTDNFDTFDGSRWGKGDWTFDGNRVDLTDKNIYSRDGMLILALTRKGQESFNGQVPRDDEPAPQSSSSAPASSSSVPASSSSVPASSSSAFVPPSSSSATNAIHGMRTTPAVAKEHRNLVNAKGAKVNPNGHKRYRVNFEH

SEQ ID NO: 4 - protein, 309 aa, Streptomyces coelicolor
MVNRRDLIKWSAVALGAGAGLAGPAPAAHAADLEWEQYPVPAAPGGNRSWQLLPSHSDDFNYTGKPQTFRGRWLDQHKDGWSGPANSLYSARHSWVADGNLIVEGRRAPDGRVYCGYVTSRTPVEYPLYTEVLMRVSGLKLSSNFWLLSRDDVNEIDVIECYGNESLHGKHMNTAYHIFQRNPFTELARSQKGYFADGSYGYNGETGQVFGDGAGQPLLRNGFHRYGVHWISATEFDFYFNGRLVRRLNRSNDLRDPRSRFFDQPMHLILNTESHQWRVDRGIEPTDAELADPSINNIYYRWVRTYQAV

SEQ ID NO: 5 - protein, 682 aa, Bacillus circulans
MKPSHFTEKRFMKKVLGLFLVVVMLASVGVLPTSKVQAAGTTVTSMEYFSPADGPVISKSGVGKASYGFVMPKFNGGSATWNDVYSDVGVNVKVGNNWVDIDQAGGYIYNQNWGHWSDGGFNGYWFTLSATTEIQLYSKANGVKLEYQLVFQNINKTTITAMNPTQGPQITASFTGGAGFTYPTFNNDSAVTYEAVADDLKVYVKPVNSSSWIDIDNNAASGWIYDHNFGQFTDGGGGYWFNVTESINVKLESKTSSANLVYTITFNEPTRNSYVITPYEGTTFTADANGSIGIPLPKIDGGAPIAKELGNFVYQININGQWVDLSNSSQSKFAYSANGYNNMSDANQWGYWADYIYGLWFQPIQENMQIRIGYPLNGQAGGNIGNNFVNYTFIGNPNAPRPDVSDQEDISIGTPTDPAIAGMNLIWQDEFNGTTLDTSKWNYETGYYLNNDPATWGWGNAELQHYTNSTQNVYVQDGKLNIKAMNDSKSFPQDPNRYAQYSSGKINTKDKLSLKYGRVDFRAKLPTGDGVWPALWMLPKDSVYGTWAASGEIDVMEARGRLPGSVSGTIHFGGQWPVNQSSGGDYHFPEGQTFANDYHVYSVVWEEDNIKWYVDGKFFYKVTNQQWYSTAAPNNPNAPFDEPFYLIMNLAVGGNFDGGRTPNASDIPATMQVDYVRVYKEQ

SEQ ID NO: 6 - protein, 243 aa, Bacillus licheniformis
MSYRVKRMLMLLVTGLFLSLSTFAASASAQTGGSFYEPFNNYNTGLWQKADGYSNGNMFNCTWRANNVSMTSLGEMRLSLTSPSYNKFDCGENRSVQTYGYGLYEVNMKPAKNVGIVSSFFTYTGPTDGTPWDEIDIEFLGKDTTKVQFNYYTNGVGNHEKIVNLGFDAANSYHTYAFDWQPNSIKWYVDGQLKHTATTQIPQTPGKIMMNLWNGAGVDEWLGSYNGVTPLSRSLHWVRYTKR

SEQ ID NO: 7 - protein, 238 aa, Paenibacillus polymyxa
MMKKKSWFTLMITGVISLFFSVSAFAGNVFWEPLSYFNSSTWQKADGYSNGQMFNCTWRANNVNFTNDGKLKLSLTSPANNKFDCGEYRSTNNYGYGLYEVSMKPAKNTGIVSSFFTYTGPSHGTQWDEIDIEFLGKDTTKVQFNYYTNGVGGHEKIINLGFDASTSFHTYAFDWQPGYIKWYVDGVLKHTATTNIPSTPGKIMMNLWNGTGVDSWLGSYNGANPLYAEYDWVKYTSN

SEQ ID NO: 8 - protein, 259 aa, Brevibacillus brevis; identical to SEQ ID NO: 2

SEQ ID NO: 9 - protein, 286 aa, Rhodothermus marinus
MCTMPLMKLKKMMRRTAFLLSVLIGCSMLGSDRSDKAPHWELVWSDEFDYSGLPDPEKWDYDVGGHGWGNQELQYYTRARIENARVGGGVLIIEARHEPYEGREYTSARLVTRGKASWTYGRFEIRARLPSGRGTWPAIWMLPDRQTYGSAYWPDNGEIDIMEHVGFNPDVVHGTVHTKAYNHLLGTQRGGSIRVPTARTDFHVYAIEWTPEEIRWFVDDSLYYRFPNERLTDPEADWRHWPFDQPFHLIMNIAVGGAWGGQQGVDPEAFPAQLVVDYVRVYRWVE

SEQ ID NO: 10 - protein, 473 aa, Thermobispora bispora
MTESAMTSRAGRGRGADLVAAVVQGHAAASDAAGDLSFPDGFIWGAATAAYQIEGAWREDGRGLWDVFSHTPGKVASGHTGDIACDHYHRYADDVRLMAGLGDRVYRFSVAWPRIVPDGSGPVNPAGLDFYDRLVDELLGHGITPYPTLYHWDLPQTLEDRGGWAARDTAYRFAEYALAVHRRLGDRVRCWITLNEPWVAAFLATHRGAPGAADVPRFRAVHHLLLGHGLGLRLRSAGAGQLGLTLSLSPVIEARPGVRGGGRRVDALANRQFLDPALRGRYPEEVLKIMAGHARLGHPGRDLETIHQPVDLLGVNYYSHVRLAAEGEPANRLPGSEGIRFERPTAVTAWPGDRPDGLRTLLLRLSRDYPGVGLIITENGAAFDDRADGDRVHDPERIRYLTATLRAVHDAIMAGADLRGYFVWSVLDNFEWAYGYHKRGIVYVDYTTMRRIPRESALWYRDVVRRNGLRNGE

SEQ ID NO: 11 - protein, 387 aa, Clostridium stercorarium
MNKFLNKKWSLILTMGGIFLMATLSLIFATGKKAFNDQTSAEDIPSLAEAFRDYFPIGAAIEPGYTTGQIAELYKKHVNMLVAENAMKPASLQPTEGNFQWADADRIVQFAKENGMELRFHTLVWHNQTPTGFSLDKEGKPMVEETDPQKREENRKLLLQRLENYIRAVVLRYKDDIKSWDVVNEVIEPNDPGGMRNSPWYQITGTEYIEVAFRATREAGGSDIKLYINDYNTDDPVKRDILYELVKNLLEKGVPIDGVGHQTHIDIYNPPVERIIESIKKFAGLGLDNIITELDMSIYSWNDRSDYGDSIPDYILTLQAKRYQELFDALKENKDIVSAVVFWGISDKYSWLNGFPVKRTNAPLLFDRNFMPKPAFWAIVDPSRLRE

SEQ ID NO: 12 - protein, 755 aa, Clostridium thermocellum
MAVDIKKIIKQMTLEEKAGLCSGLDFWHTKPVERLGIPSIMMTDGPHGLRKQREDAEIADINNSVPATCFPSAAGLACSWDRELVERVGAALGEECQAENVSILLGPGANIKRSPLCGRNFEYFSEDPYLSSELAASHIKGVQSQGVGACLKHFAANNQEHRRMTVDTIVDERTLREIYFASFENAVKKARPWVVMCAYNKLNGEYCSENRYLLTEVLKNEWMHDGFVVSDWGAVNDRVSGLDAGLDLEMPTSHGITDKKIVEAVKSGKLSENILNRAVERILKVIFMALENKKENAQYDKDAHHRLARQAAAESMVLLKNEDDVLPLKKSGTIALIGAFVKKPRYQGSGSSHITPTRLDDIYEEIKKAGGDKVNLVYSEGYRLENDGIDEELINEAKKAASSSDVAVVFAGLPDEYESEGFDRTHMSIPENQNRLIEAVAEVQSNIVVVLLNGSPVEMPWIDKVKSVLEAYLGGQALGGALADVLFGEVNPSGKLAETFPVKLSHNPSYLNFPGEDDRVEYKEGLFVGYRYYDTKGIEPLFPFGHGLSYTKFEYSDISVDKKDVSDNSIINVSVKVKNVGKMAGKEIVQLYVKDVKSSVRRPEKELKGFEKVFLNPGEEKTVTFTLDKRAFAYYNTQIKDWHVESGEFLILIGRSSRDIVLKESVRVNSTVKIRKRFTVNSAVEDVMSDSSAAAVLGPVLKEITDALQIDMDNAHDMMAANIKNMPLRSLVGYSQGRLSEEMLEELVDKINNVE

SEQ ID NO: 13 - protein, 480 aa, Thermotoga maritima
MPSVKIGIIGAGSAVFSLRLVSDLCKTPGLSGSTVTLMDIDEERLDAILTIAKKYVEEVGADLKFEKTMNLDDVIIDADFVINTAMVGGHTYLEKVRQIGEKYGYYRGIDAQEFNMVSDYYTFSNYNQLKYFVDIARKIEKLSPKAWYLQAANPIFEGTTLVTRTVPIKAVGFCHGHYGVMEIVEKLGLEEEKVDWQVAGVNHGIWLNRFRYNGGNAYPLLDKWIEEKSKDWKPENPFNDQLSPAAIDMYRFYGVMPIGDTVRNSSWRYHRDLETKKKWYGEPWGGADSEIGWKWYQDTLGKVTEITKKVAKFIKENPSVRLSDLGSVLGKDLSEKQFVLEVEKILDPERKSGEQHIPFIDALLNDNKARFVVNIPNKGIIHGIDDDVVVEVPALVDKNGIHPEKIEPPLPDRVVKYYLRPRIMRMEMALEAFLTGDIRIIKELLYRDPRTKSDEQVEKVIEEILALPENEEMRKHYLKR

SEQ ID NO: 14 - protein, 225 aa, Thermomyces lanuginosus
MVGFTPVALAALAATGALAFPAGNATELEKRQTTPNSEGWHDGYYYSWWSDGGAQATYTNLEGGTYEISWGDGGNLVGGKGWNPGLNARAIHFEGVYQPNGNSYLAVYGWTRNPLVEYYIVENFGTYDPSSGATDLGTVECDGSIYRLGKTTRVNAPSIDGTQTFDQYWSVRQDKRTSGTVQTGCHFDAWARAGLNVNGDHYYQIVATEGYFSSGYARITVADVG

SEQ ID NO: 15 - protein, 562 aa, Acidothermus cellulolyticus
MPRALRRVPGSRVMLRVGVVVAVLALVAALANLAVPRPARAAGGGYWHTSGREILDANNVPVRIAGINWFGFETCNYVVHGLWSRDYRSMLDQIKSLGYNTIRLPYSDDILKPGTMPNSINFYQMNQDLQGLTSLQVMDKIVAYAGQIGLRIILDRHRPDCSGQSALWYTSSVSEATWISDLQALAQRYKGNPTVVGFDLHNEPHDPACWGCGDPSIDWRLAAERAGNAVLSVNPNLLIFVEGVQSYNGDSYWWGGNLQGAGQYPVVLNVPNRLVYSAHDYATSVYPQTWFSDPTFPNNMPGIWNKNWGYLFNQNIAPVWLGEFGTTLQSTTDQTWLKTLVQYLRPTAQYGADSFQWTFWSWNPDSGDTGGILKDDWQTVDTVKDGYLAPIKSSIFDPVGASASPSSQPSPSVSPSPSPSPSASRTPTPTPTPTASPTPTLTPTATPTPTASPTPSPTAASGARCTASYQVNSDWGNGFTVTVAVTNSGSVATKTWTVSWTFGGNQTITNSWNAAVTQNGQSVTARNMSYNNVIQPGQNTTFGFQASYTGSNAAPTVACAAS

SEQ ID NO: 16 - protein, 491 aa, Sulfolobus acidocaldarius
MLSFPKGFKFGWSQSGFQSEMGTPGSEDPNSDWHVWVHDRENIVSQVVSGDLPENGPGYWGNYKRFHDEAEKIGLNAVRINVEWSRIFPRPLPKPEMQTGTDKENSPVISVDLNESKLREMDNYANHEALSHYRQILEDLRNRGFHIVLNMYHWTLPIWLHDPIRVRRGDFTGPTGWLNSRTVYEFARFSAYVAWKLDDLASEYATMNEPNVVWGAGYAFPRAGFPPNYLSFRLSEIAKWNIIQAHARAYDAIKSVSKKSVGIIYANTSYYPLRPQDNEAVEIAERLNRWSFFDSIIKGEITSEGQNVREDLRNRLDWIGVNYYTRTVVTKAESGYLTLPGYGDRCERNSLSLANLPTSDFGWEFFPEGLYDVLLKYWNRYGLPLYVMENGIADDADYQRPYYLVSHIYQVHRALNEGVDVRGYLHWSLADNYEWSSGFSMRFGLLKVDYLTKRLYWRPSALVYREITRSNGIPEELEHLNRVPPIKPLRH

SEQ ID NO: 17 - protein, 510 aa, Pyrococcus woesei
MFPEKFLWGVAQSGFQFEMGDKLRRNIDTNTDWWHWVRDKTNIEKGLVSGDLPEEGINNYELYEKDHEIARKLGLNAYRIGIEWSRIFPWPTTFIDVDYSYNESYNLIEDVKITKDTLEELDEIANKREVAYYRSVINSLRSKGFKVIVNLNHFTLPYWLHDPIEARERALTNKRNGWVNPRTVIEFAKYAAYIAYKFGDIVDMWSTFNEPMVVVELGYLAPYSGFPPGVLNPEAAKLAILHMINAHALAYRQIKKFDTEKADKDSKEPAEVGIIYNNIGVAYPKDPNDSKDVKAAENDNFFHSGLFFEAIHKGKLNIEFDGETFIDAPYLKGNDWIGVNYYTREVVTYQEPMFPSIPLITFKGVQGYGYACRPGTLSKDDRPVSDIGWELYPEGMYDSIVEAHKYGVPVYVTENGIADSKDILRPYYIASHIKMTEKAFEDGYEVKGYFHWALTDNFEWALGFRMRFGLYEVNLITKERIPREKSVSIFREIVANNGVTKKIEEELLRG

SEQ ID NO: 18 - protein, 562 aa, Geobacillus thermoglucosidasius
MERVWWKEAVVYQIYPRSFYDSNGDGIGDIRGIIAKLDYLKELGVDVVWLSPVYKSPNDDNGYDISDYRDIMDEFGTMADWKTMLEEMHKRGIKLVMDLVVNHTSDEHPWFIESRKSKDNPYRDYYIWRPGKNGKEPNNWESVFSGSAWEYDEMTGEYYLHLFSKKQPDLNWENPKVRREVYEMMKFWLDKGVDGFRMDVINMISKVPELPDGEPQSGKKYASGSRYYMNGPRVHEFLQEMNREVLSKYDIMTVGETPGVTPKEGILYTDPSRRELNMVFQFEHMDLDSGPGGKWDIRPWSLADLKKTMTKWQKELEGKGWNSLYLNNHDQPRAVSRFGDDGKYRVESAKMLATFLHMMQGTPYIYQGEEIGMTNVRFPSIEDYRDIETLNMYKERVEEYGEDPQEVMEKIYYKGRDNARTPMQWDDSENAGFTAGTPWIPVNPNYKEINVKAALEDPNSVFHYYKKLIQLRKQHDIIVYGTYDLILEDDPYIYRYTRTLGNEQLIVITNFSEKTPVFRLPDHIIYKTKELLISNYDVDEAEELKEIRLRPWEARVYKIRLP

SEQ ID NO: 19 - protein, 649 aa, Pyrococcus furiosus
MGDKINFIFGIHNHQPLGNFGWVFEEAYEKCYWPFLETLEEYPNMKVAIHTSGPLIEWLQDNRPEYIDLLRSLVKRGQVEIVVAGFYEPVLASIPKEDRIEQIRLMKEWAKSIGFDARGVWLTERVWQPELVKTLKESGIDYVIVDDYHFMSAGLSKEELYWPYYTEDGGEVIAVFPIDEKLRYLIPFRPVDKVLEYLHSLIDGDESKVAVFHDDGEKFGIWPGTYEWVYEKGWLREFFDRISSDEKINLMLYTEYLEKYKPRGLVYLPIASYFEMSEWSLPAKQARLFVEFVNELKVKGIFEKYRVFVRGGIWKNFFYKYPESNYMHKRMLMVSKLVRNNPEARKYLLRAQCNDAYWHGLFGGVYLPHLRRAIWNNLIKANSYVSLGKVIRDIDYDGFEEVLIENDNFYAVFKPSYGGSLVEFSSKNRLVNYVDVLARRWEHYHGYVESQFDGVASIHELEKKIPDEIRKEVAYDKYRRFMLQDHVVPLGTTLEDFMFSRQQEIGEFPRVPYSYELLDGGIRLKREHLGIEVEKTVKLVNDGFEVEYIVNNKTGNPVLFAVELNVAVQSIMESPGVLRGKEIVVDDKYAVGKFALKFEDEMEVWKYPVKTLSQSESGWDLIQQGVSYIVPIRLEDKIRFKLKFEEASG

SEQ ID NO: 20 - protein, 824 aa, Bacillus sp.
MMLRKKTKQLISSILILVLLLSLFPAALAAEGNTREDNFKHLLGNDNVKRPSEAGALQLQEVDGQMTLVDQHGEKIQLRGMSTHGLQWFPEILNDNAYKALSNDWDSNMIRLAMYVGENGYATNPELIKQRVIDGIELAIENDMYVIVDWHVHAPGDPRDPVYAGAKDFFREIAALYPNNPHIIYELANEPSSNNNGGAGIPNNEEGWKAVKEYADPIVEMLRKSGNADDNIIIVGSPNWSQRPDLAADNPIDDHHTMYTVHFYTGSHAASTESYPSETPNSERGNVMSNTRYALENGVAVFATEWGTSQASGDGGPYFDEADVWIEFLNENNISWANWSLTNKNEVSGAFTPFELGKSNATNLDPGPDHVWAPEELSLSGEYVRARIKGVNYEPIDRTKYTKVLWDFNDGTKQGFGVNSDSPNKELIAVDNENNTLKVSGLDVSNDVSDGNFWANARLSANGWGKSVDILGAEKLTMDVIVDEPTTVAIAAIPQSSKSGWANPERAVRVNAEDFVQQTDGKYKAGLTITGEDAPNLKNIAFHEEDNNMNNIILFVGTDAADVIYLDNIKVIGTEVEIPVVHDPKGEAVLPSVFEDGTRQGWDWAGESGVKTALTIEEANGSNALSWEFGYPEVKPSDNWATAPRLDFWKSDLVRGENDYVAFDFYLDPVRATEGAMNINLVFQPPTNGYWVQAPKTYTINFDELEEANQVNGLYHYEVKINVRDITNIQDDTLLRNMMIIFADVESDFAGRVFVDNVRFEGAATTEPVEPEPVDPGEETPPVDEKEAKKEQKEAEKEEKEAVKEEKKEAKEEKKAVKNEAKKK

SEQ ID NO: 21 - protein, 1059 aa, Thermotoga maritima
MQVRKRRGLLDVSTAVLVGILAGFLGVVLAASGVLSFGKEASSKGDSSLETVLALSFEGTTEGVVPFGKDVVLTASQDVAADGEYSLKVENRTSPWDGVEIDLTGKVKSGADYLLSFQVYQSSDAPQLFNVVARTEDEKGERYDVILDKVVVSDHWKEILVPFSPTFEGTPAKYSLIIVASKNTNFNFYLDKVQVLAPKESGPKVIYETSFENGVGDWQPRGDVNIEASSEVAHSGKSSLFISNRQKGWQGAQINLKGILKTGKTYAFEAWVYQNSGQDQTIIMTMQRKYSSDASTQYEWIKSATVPSGQWVQLSGTYTIPAGVTVEDLTLYFESQNPTLEFYVDDVKIVDTTSAEIKIEMEPEKEIPALKEVLKDYFKVGVALPSKVFLNPKDIELITKHFNSITAENEMKPESLLAGIENGKLKFRFETADKYIQFVEENGMVIRGHTLVWHNQTPDWFFKDENGNLLSKEAMTERLKEYIHTVVGHFKGKVYAWDVVNEAVDPNQPDGLRRSTWYQIMGPDYIELAFKFAREADPDAKLFYNDYNTFEPRKRDIIYNLVKDLKEKGLIDGIGMQCHISLATDIKQIEEAIKKFSTIPGIEIHITELDMSVYRDSSSNYPEAPRTALIEQAHKMMQLFEIFKKYSNVITNVTFWGLKDDYSWRATRRNDWPLIFDKDHQAKLAYWAIVAPEVLPPLPKESRISEGEAVVVGMMDDSYLMSKPIEILDEEGNVKATIRAVWKDSTIYIYGEVQDKTKKPAEDGVAIFINPNNERTPYLQPDDTYAVLWTNWKTEVNREDVQVKKFVGPGFRRYSFEMSITIPGVEFKKDSYIGFDAAVIDDGKWYSWSDTTNSQKTNTMNYGTLKLEGIMVATAKYGTPVIDGEIDEIWNTTEEIETKAVAMGSLDKNATAKVRVLWDENYLYVLAIVKDPVLNKDNSNPWEQDSVEIFIDENNHKTGYYEDDDAQFRVNYMNEQTFGTGGSPARFKTAVKLIEGGYIVEAAIKWKTIKPTPNTVIGFNIQVNDANEKGQRVGIISWSDPTNNSWRDPSKFGNLRLIK

SEQ ID NO: 22 - protein, 512 aa, Clostridium stercorarium
MKRKVKKMAAMATSIIMAIMIILHSIPVLAGRIIYDNETGTHGGYDYELWKDYGNTIMELNDGGTFSCQWSNIGNALFRKGRKFNSDKTYQELGDIVVEYGCDYNPNGNSYLCVYGWTRNPLVEYYIVESWGSWRPPGATPKGTITQWMAGTYEIYETTRVNQPSIDGTATFQQYWSVRTSKRTSGTISVTEHFKQWERMGMRMGKMYEVALTVEGYQSSGYANVYKNEIRIGANPTPAPSQSPIRRDAFSIIEAEEYNSTNSSTLQVIGTPNNGRGIGYIENGNTVTYSNIDFGSGATGFSATVATEVNTSIQIRSDSPTGTLLGTLYVSSTGSWNTYQTVSTNISKITGVHDIVLVFSGPVNVDNFIFSRSSPVPAPGDNTRDAYSIIQAEDYDSSYGPNLQIFSLPGGGSAIGYIENGYSTTYKNIDFGDGATSVTARVATQNATTIQVRLGSPSGTLLGTIYVGSTGSFDTYRDVSATISNTAGVKDIVLVFSGPVNVDWFVFSKSGT

SEQ ID NO: 23 - protein, 457 aa, Solanum lycopersicum
MVIQRNSILLLIIIFASSISTCRSNVIDDNLFKQVYDNILEQEFAHDFQAYLSYLSKNIESNNNIDKVDKNGIKVINVLSFGAKGDGKTYDNIAFEQAWNEACSSRTPVQFVVPKNKNYLLKQITFSGPCRSSISVKIFGSLEASSKISDYKDRRLWIAFDSVQNLVVGGGGTINGNGQVWWPSSCKINKSLPCRDAPTALTFWNCKNLKVNNLKSKNAQQIHIKFESCTNVVASNLMINASAKSPNTDGVHVSNTQYIQISDTIIGTGDDCISIVSGSQNVQATNITCGPGHGISIGSLGSGNSEAYVSNVTVNEAKIIGAENGVRIKTWQGGSGQASNIKFLNVEMQDVKYPIIIDQNYCDRVEPCIQQFSAVQVKNVVYENIKGTSATKVAIKFDCSTNFPCEGIIMENINLVGESGKPSEATCKNVHFNNAEHVTPHCTSLEISEDEALLYNY

SEQ ID NO: 24 - protein, 649 aa, Clostridium thermocellum
MSRMTLKSSMKKRVLSLLIAVVFLSLTGVFPSGLIETKVSAAKITENYQFDSRIRLNSIGFIPNHSKKATIAANCSTFYVVKEDGTIVYTGTATSMFDNDTKETVYIADFSSVNEEGTYYLAVPGVGKSVNFKIAMNVYEDAFKTAMLGMYLLRCGTSVSATYNGIHYSHGPCHTNDAYLDYINGQHTKKDSTKGWHDAGDYNKYVVNAGITVGSMFLAWEHFKDQLEPVALEIPEKNNSIPDFLDELKYEIDWILTMQYPDGSGRVAHKVSTRNFGGFIMPENEHDERFFVPWSSAATADFVAMTAMAARIFRPYDPQYAEKCINAAKVSYEFLKNNPANVFANQSGFSTGEYATVSDADDRLWAAAEMWETLGDEEYLRDFENRAAQFSKKIEADFDWDNVANLGMFTYLLSERPGKNPALVQSIKDSLLSTADSIVRTSQNHGYGRTLGTTYYWGCNGTVVRQTMILQVANKISPNNDYVNAALDAISHVFGRNYYNRSYVTGLGINPPMNPHDRRSGADGIWEPWPGYLVGGGWPGPKDWVDIQDSYQTNEIAINWNAALIYALAGFVNYNSPQNEVLYGDVNDDGKVNSTDLTLLKRYVLKAVSTLPSSKAEKNADVNRDGRVNSSDVTILSRYLIRVIEKLPI

SEQ ID NO: 25 - protein, 203 aa, Sulfolobus acidocaldarius
MLRSLVLNEKLRARVLERAEEFLLNNKADEEVWFRELVLCILTSNSSFISAYKSMNYILDKILYMDEKEISILLQESGYRFYNLKAKYLYRAKNLYGKVKKTIKEIADKDQMQAREFIATHIYGIGYKEASHFLRNVGYLDLAIIDRHILRFINNLGIPIKLKSKREYLLAESLLRSIANNLNVQVGLLDLFIFFKQTNTIVK

SEQ ID NO: 26 - protein, 432 aa, Thermotoga maritima
MFKPNYHFFPITGWMNDPNGLIFWKGKYHMFYQYNPRKPEWGNICWGHAVSDDLVHWRHLPVALYPDDETHGVFSGSAVEKDGKMFLVYTYYRDPTHNKGEKETQCVAMSENGLDFVKYDGNPVISKPPEEGTHAFRDPKVNRSNGEWRMVLGSGKDEKIGRVLLYTSDDLFHWKYEGVIFEDETTKEIECPDLVRIGEKDILIYSITSTNSVLFSMGELKEGKLNVEKRGLLDHGTDFYAAQTFFGTDRVVVIGWLQSWLRTGLYPTKREGWNGVMSLPRELYVENNELKVKPVDELLALRKRKVFETAKSGTFLLDVKENSYEIVCEFSGEIELRMGNESEEVVITKSRDELIVDTTRSGVSGGEVRKSTVEDEATNRIRAFLDSCSVEFFFNDSIAFSFRIHPENVYNILSVKSNQVKLEVFELENIWL

SEQ ID NO: 27 - protein, 1021 aa, Rhodothermus marinus
MAGPHRSRAAGPPPFAVDEHVALEMVAFRGEVFAGHGLLADQRLIAHTGRPALNAQRITQQKQRDQCRGQRHRHHQGGRNLRKAHRTFHEHQSTQDQAHDAPHGQQAKTGHEGLGHEHAQAQHQQGQSNVVDRQDGEPVEAQHQKDGAQRAGNAPAGRVELEQQPVEAQHQQQEGDVRIGKRRQNAFAPPALDHVHGGPGRLQRHGLAVERHVPAVQQHQQRVQRGRQQIDHVLGHGLPGRQRLAFRDGPRRPVGVASPVLGQRPCPGHRIVQNLFRHGIDPCRVGRCRRSPSELHGMGCADVRARGHGRHMRGQRDEHPGRGRPCARRRHVDDDRDRTPQEKLYDVARGLDEPARRVHFDDEADRSVFRGLAQPAPDEPEGRRRDRLVLQRQSVNHRRGRLSRHRQQHQPQQQRPHGNQAFLGKYEKRRRKPTACLKSLRRFPDKDAPVLYFVNQLEKTKRRMTLLLVWLIFTGVAGEIRLEAEDGELLGVAVDSTLTGYSGRGYVTGFDAPEDSVRFSFEAPRGVYRVVFGVSFSSRFASYALRVDDWHQTGSLIKRGGGFFEASIGEIWLDEGAHTMAFQLMNGALDYVRLEPVSYGPPARPPAQLSDSQATASAQALFAFLLSEYGRHILAGQQQNPYRRDFDAINYVRNVTGKEPALVSFDLIDYSPTREAHGVVHYQTPEDWIAWAGRDGIVSLMWHWNAPTDLIEDPSQDCYWWYGFYTRCTTFDVAAALADTSSERYRLLLRDIDVIAAQLQKFQQADIPVLWRPLHEAAGGWFWWGAKGPEPFKQLWRLLYERLVHHHGLHNLIWVYTHEPGAAEWYPGDAYVDIVGRDVYADDPDALMRSDWNELQTLFGGRKLVALTETGTLPDVEVITDYGIWWSWFSIWTDPFLRDVDPDRLTRVYHSERVLTRDELPDWRSYVLHATTVQPAGDLALAVYPNPGAGRLHVEVGLPVAAPVVVEVFNLLGQRVFQYQAGMQPAGLWRRAFELALAPGVYLVQVRAGNLVARRRWVSVR

SEQ ID NO: 28 - protein, 549 aa, Geobacillus stearothermophilus
MLTFHRIIRKGWMFLLAFLLTALLFCPTGQPAKAAAPFNGTMMQYFEWYLPDDGTLWTKVANEANNLSSLGITALWLPPAYKGTSRSDVGYGVYDLYDLGEFNQKGAVRTKYGTKAQYLQAIQAAHAAGMQVYADVVFDHKGGADGTEWVDAVEVNPSDRNQEISGTYQIQAWTKFDFPGRGNTYSSFKWRWYHFDGVDWDESRKLSRIYKFRGIGKAWDWEVDTENGNYDYLMYADLDMDHPEVVTELKSWGKWYVNTTNIDGFRLDAVKHIKFSFFPDWLSDVRSQTGKPLFTVGEYWSYDINKLHNYIMKTNGTMSLFDAPLHNKFYTASKSGGTFDMRTLMTNTLMKDQPTLAVTFVDNHDTEPGQALQSWVDPWFKPLAYAFILTRQEGYPCVFYGDYYGIPQYNIPSLKSKIDPLLIARRDYAYGTQHDYLDHSDIIGWTREGVTEKPGSGLAALITDGPGGSKWMYVGKQHAGKVFYDLTGNRSDTVTINSDGWGEFKVNGGSVSVWVPRKTTVSTIAWSITTRPWTDEFVRWTEPRLVAWP

SEQ ID NO: 29 - protein, 705 aa, Geobacillus stearothermophilus
MPTNLFFNAHHSPVGAFASFTLGFPGKSGGLDLELARPPRQNVLIGVESLHESGLYHVLPFLETAEEDESKRYDIENPDPNPQKPNILIPFAKEEIQREFHVATDTWKAGDLTFTIYSPVKAVPNPETADEEELKLALVPAVIVEMTIDNTNGTRARRAFFGFEGTDPYTSMRRIDDTCPQLRGVGQGRILSIVSKDEGVRSALHFSMEDILTAQLEENWTFGLGKVGALIVDVPAGEKKTYQFAVCFYRGGYVTAGMDASYFYTRFFQNIEEVGLYALEQAEVLKEQSFRSNKLIEKEWLSDDQTFMMAHAIRSYYGNTQLLEHEGKPIWVVNEGEYRMMNTFDLTVDQLFFELKLNPWTVKNVLDLYVERYSYEDRVRFPGEETEYPSGISFTHDMGVANTFSRPHYSSYELYGISGCFSHMTHEQLVNWVLCAAVYIEQTKDWAWRDKRLAILEQCLESMVRRDHPDPEQRNGVMGLDSTRTMGGAEITTYDSLDVSLGQARNNLYLAGKCWAAYVALEKLFRDVGKEELAALAGEQAEKCAATIVSHVTDDGYIPAIMGEGNDSKIIPAIEGLVFPYFTNCHEALDENGRFGAYIQALRNHLQYVLREGICLFPDGGWKISSTSNNSWLSKIYLCQFIARHILGWEWDEQGKRADAAHVAWLTHPTLSIWSWSDQIIAGEITGSKYYPRGVTSILWLEEGE

SEQ ID NO: 30 - protein, 330 aa, Geobacillus stearothermophilus
MCSSIPSLREVFANDFRIGAAVNPVTLEAQQSLLIRHVNSLTAENHMKFEHLQPEEGRFTFDIAIKSSTSPFSSHGVRGHTLVWHNQTPSWVFQDSQGHFVGRDVLLERMKSHISTVVQRYKGKVYCWDVINEAVADEGSEWLRSSTWRQIIGDDFIQQAFLYAHEADPEALLFYNDYNECFPEKREKIYTLVKSLRDKGIPIHGIGMQAHWSLNRPTLDEIRAAIERYASLGVILHITELDISMFEFDDHRKDLAAPTNEMVERQAERYEQIFSLFKEYRDVIQNVTFWGIADDHTWLDHFPVQGRKNWPLLFDEQHNPKPAFWRVVNI

SEQ ID NO: 31 - protein, 407 aa, Geobacillus stearothermophilus
MRNVVRKPLTIGLALTLLLPMGMTATSAKNADSYAKKPHISALNAPQLDQRYKNEFTIGAAVEPYQLQNEKDVQMLKRHFNSIVAENVMKPISIQPEEGKFNFEQADRIVKFAKANGMDIRFHTLVWHSQVPQWFFLDKEGKPMVNETDPVKREQNKQLLLKRLETHIKTIVERYKDDIKYWDVVNEVVGDDGKLRNSPWYQIAGIDYIKVAFQAARKYGGDNIKLYMNDYNTEVEPKRTALYNLVKQLKEEGVPIDGIGHQSHIQIGWPSEAEIEKTINMFAALGLDNQITELDVSMYGWPPRAYPTYDAIPKQKFLDQAARYDRLFKLYEKLSDKISNVTFWGIADNHTWLDSRADVYYDANGNVVVDPNAPYAKVEKGKGKDAPFVFGPDYKVKPAYWAIIDHK

SEQ ID NO: 32 - protein, 686 aa, Dictyoglomus thermophilum
MTKSIYFSLGIHNHQPVGNFDFVIERAYEMSYKPLINFFFKHPDFPINVHFSGFLLLWLEKNHPEYFEKLKIMAERGQIEFVSGGFYEPILPIIPDKDKVQQIKKLNKYIYDKFGQTPKGMWLAERVWEPHLVKYIAEAGIEYVVVDDAHFFSVGLKEEDLFGYYLMEEQGYKLAVFPISMKLRYLIPFADPEETITYLDKFASEDKSKIALLFDDGEKFGLWPDTYRTVYEEGWLETFVSKIKENFLLVTPVNLYTYMQRVKPKGRIYLPTASYREMMEWVLFPEAQKELEELVEKLKTENLWDKFSPYVKGGFWRNFLAKYDESNHMQKKMLYVWKKVQDSPNEEVKEKAMEEVFQGQANDAYWHGIFGGLYLPHLRTAIYEHLIKAENYLENSEIRFNIFDFDCDGNDEIIVESPFFNLYLSPNHGGSVLEWDFKTKAFNLTNVLTRRKEAYHSKLSYVTSEAQGKSIHERWTAKEEGLENILFYDNHRRVSFTEKIFESEPVLEDLWKDSSRLEVDSFYENYDYEINKDENKIRVLFSGVFRGFELCKSYILYKDKSFVDVVYEIKNVSETPISLNFGWEINLNFLAPNHPDYYFLIGDQKYPLSSFGIEKVNNWKIFSGIGIELECVLDVEASLYRYPIETVSLSEEGFERVYQGSALIHFYKVDLPVGSTWRTTIRFWVK

SEQ ID NO: 33 - protein, 1055 aa, Thermotoga neapolitana
MRKKRRGFLNASTAVLVGILAGFLGVVLAATGALGFAVRESLLLKQFLFLSFEGNTDGASPFGKDVVVTASQDVAADGEYSLKVENRTSVWDGVEIDLTGKVNTGTDYLLSFHVYQTSDSPQLFSVLARTEDEKGERYKILADKVVVPNYWKEILVPFSPTFEGTPAKFSLIITSPKKTDFVFYVDNVQVLTPKEAGPKVVYETSFEKGIGDWQPRGSDVKISISPKVAHSGKKSLFVSNRQKGWHGAQISLKGILKTGKTYAFEAWVYQESGQDQTIIMTMQRKYSSDSSTKYEWIKAATVPSGQWVQLSGTYTIPAGVTVEDLTLYFESQNPTLEFYVDDVKVVDTTSAEIKLEMNPEEEIPALKDVLKDYFRVGVALPSKVFINQKDIALISKHSNSSTAENEMKPDSLLAGIENGKLKFRFETADKYIEFAQQNGMVVRGHTLVWHNQTPEWFFKDENGNLLSKEEMTERLREYIHTVVGHFKGKVYAWDVVNEAVDPNQPDGLRRSTWYQIMGPDYIELAFKFAREADPNAKLFYNDYNTFEPKKRDIIYNLVKSLKEKGLIDGIGMQCHISLATDIRQIEEAIKKFSTIPGIEIHITELDISVYRDSTSNYSEAPRTALIEQAHKMAQLFKIFKKYSNVITNVTFWGLKDDYSWRATRRNDWPLIFDKDYQAKLAYWAIVAPEVLPPLPKESKISEGEAVVVGMMDDSYMMSKPIEIYDEEGNVKATIRAIWKDSTIYVYGEVQDATKKPAEDGVAIFINPNNERTPYLQPDDTYVVLWTNWKSEVNREDVEVKKFVGPGFRRYSFEMSITIPGVEFKKDSYIGFDVAVIDDGKWYSWSDTTNSQKTNTMNYGTLKLEGVMVATAKYGTPVIDGEIDDIWNTTEEIETKSVAMGSLEKNATAKVRVLWDEENLYVLAIVKDPVLNKDNSNPWEQDSVEIFIDENNHKTGYYEDDDAQFRVNYMNEQSFGTGASAARFKTAVKLIEGGYIVEAAIKWKTIKPSPNTVIGFNVQVNDANEKGQRVGIISWSDPTNNSWRDPSKFGNLRLIK

SEQ ID NO: 34 - protein, 431 aa, Thermus thermophilus
MDDHAEKFLWGVATSAYQIEGATQEDGRGPSIWDAFARRPGAIRDGSTGEPACDHYRRYEEDIALMQSLGVRAYRFSVAWPRILPEGRGRINPKGLAFYDRLVDRLLASGITPFLTLYHWDLPLALEERGGWRSRETAFAFAEYAEAVARALADRVPFFATLNEPWCSAFLGHWTGEHAPGLRNLEAALRAAHHLLLGHGLAVEALRAAGARRVGIVLNFAPAYGEDPEAVDVADRYHNRYFLDPILGKGYPESPFRDPPPVPILSRDLELVARPLDFLGVNYYAPVRVAPGTGTLPVRYLPPEGPATAMGWEVYPEGLHHLLKRLGREVPWPLYVTENGAAYPDLWTGEAVVEDPERVAYLEAHVEAALRAREEGVDLRGYFVWSLMDNFEWAFGYTRRFGLYYVDFPSQRRIPKRSALWYRERIARAQT

SEQ ID NO: 35 - protein, 431 aa, Thermus thermophilus
MTENAEKFLWGVATSAYQIEGATQEDGRGPSIWDAFAQRPGAIRDGSTGEPACDHYRRYEEDIALMQSLGVRAYRFSVAWPRILPEGRGRINPKGLAFYDRLVDRLLASGITPFLTLYHWDLPLALEERGGWRSRETAFAFAEYAEAVARALADRVPFFATLNEPWCSAFLGHWTGEHAPGLRNLEAALRAAHHLLLGHGLAVEALRAAGARRVGIVLNFAPAYGEDPEAVDVADRYHNRFFLDPILGKGYPESPFRDPPPVPILSRDLELVARPLDFLGVNYYAPVRVAPGTGTLPVRYLPPEGPATAMGWEVYPEGLYHLLKRLGREVPWPLYVTENGAAYPDLWTGEAVVEDPERVAYLEAHVEAALRAREEGVDLRGYFVWSLMDNFEWAFGYTRRFGLYYVDFPSQRRIPKRSALWYRERIARAQT

SEQ ID NO: 36 - protein, 280 aa, Thermus thermophilus
MAQVGRGASPLSRARVPPLPHPLDGEHLPHDPAGGGHGKASSQDAPVGQLPGHLARPAFFHYLKNSFLVCSLTTVFALAVATFAGYALARFRFPGAELFGGSVLVTQVIPGILFLIPIYIMYIYVQNWVRSALGLEVRLVGSYGGLVFTYTAFFVPLSIWILRGFFASIPKELEEAAMVDGATPFQAFHRVILPLALPGLAATAVYIFLTAWDELLFAQVLTTEATATVPVGIRNFVGNYQNRYDLVMAAATVATLPVLVLFFFVQRQLIQGLTAGAVKG

SEQ ID NO: 37 - protein, 431 aa, Thermus filiformis
MAENAEKFLWGVATSAYQIEGATQEDGRGPSIWDTFARRPGAIRDGSTGEPACDHYHRYEEDIALMQSLGVGVYRFSVAWPRILPEGRGRINPKGLAFYDRLVDRLLAAGITPFLTLYHWDLPQALEDRGGWRSRETAFAFAEYAEAVARALADRVPFFATLNEPWCSAFLGHWTGEHAPGLRNLEAALRAAHHLLLGHGLAVEALRAAGAKRVGIVLNFAPVYGEDPEAVDVADRYHNRYFLDPILGRGYPESPFQDPPPTPNLSRDLELVARPLDFLGVNYYAPVRVAPGTGPLPVRYLPPEGPVTAMGWEVYPEGLYHLLKRLGREVPWPLYITENGAAYPDLWTGEAVVEDPERVAYLEAHVEAALRAREEGVDLRGYFVWSLMDNFEWAFGYTRRFGLYYVDFPSQRRIPKRSALWYRERIARAQL

SEQ ID NO: 38 - protein, 481 aa, Thermosphaera aggregans
MKFPKDFMIGYSSSPFQFEAGIPGSEDPNSDWWVWVHDPENTAAGLVSGDFPENGPGYWNLNQNDHDLAEKLGVNTIRVGVEWSRIFPKPTFNVKVPVERDENGSIVHVDVDDKAVERLDELANKEAVNHYVEMYKDWVERGRKLILNLYHWPLPLWLHNPIMVRRMGPDRAPSGWLNEESVVEFAKYAAYIAWKMGELPVMWSTMNEPNVVYEQGYMFVKGGFPPGYLSLEAADKARRNMIQAHARAYDNIKRFSKKPVGLIYAFQWFELLEGPAEVFDKFKSSKLYYFTDIVSKGSSIINVEYRRDLANRLDWLGVNYYSRLVYKIVDDKPIILHGYGFLCTPGGISPAENPCSDFGWEVYPEGLYLLLKELYNRYGVDLIVTENGVSDSRDALRPAYLVSHVYSVWKAANEGIPVKGYLHWSLTDNYEWAQGFRQKFGLVMVDFKTKKRYLRPSALVFREIATHNGIPDELQHLTLIQ

SEQ ID NO: 39 - protein, 334 aa, Clostridium thermocellum
MKNRVISLLMASLLLVLSVIVAPFYKAEAATVVNTPFVAVFSNFDSSQWEKADWANGSVFNCVWKPSQVTFSNGKMILTLDREYGGSYPYKSGEYRTKSFFGYGYYEVRMKAAKNVGIVSSFFTYTGPSDNNPWDEIDIEFLGKDTTKVQFNWYKNGVGGNEYLHNLGFDASQDFHTYGFEWRPDYIDFYVDGKKVYRGTRNIPVTPGKIMMNLWPGIGVDEWLGRYDGRTPLQAEYEYVKYYPNGVPQDNPTPTPTIAPSTPTNPNLPLKGDVNGDGHVNSSDYSLFKRYLLRVIDRFPVGDQSVADVNRDGRIDSTDLTMLKRYLIRAIPSL

SEQ ID NO: 40 - protein, 263 aa, Artificial Sequence
  source: /note="Description of Artificial Sequence: Synthetic polypeptide"
MGFVLFSQLPSFLLVSTLLLFLVISHSCRAQNGGSYPYKSGEYRTKSFFGYGYYEVRMKAAKNVGIVSSFFTYTGPSDNNPWDEIDIEFLGKDTTKVQFNWYKNGVGGNEYLHNLGFDASQDFHTYGFEWRPDYIDFYVDGKKVYRGTRNIPVTPGKIMMNLWPGIGVDEWLGRYDGRTPLQAEYEYVKYYPNGRSKLVVNTPFVAVFSNFDSSQWEKADWANGSVFNCVWKPSQVTFSNGKMILTLDREYVDHHHHHHKDEL

SEQ ID NO: 41 - protein, 217 aa, Plasmodium falciparum
MNKLYSLFLFLFIQLSIKYNNAKVTVDTVCKRGFLIQMSGHLECKCENDLVLVNEETCEEKVLKCDEKTVNKPCGDFSKCIKIDGNPVSYACKCNLGYDMVNNVCIPNECKNVTCGNGKCILDTSNPVKTAVCSCNIGKVPNVQDQNKCSKDGETKCSLKCLKENETCKAVDGIYKCDCKDGFIIDNESSICTAFSAYNILNLSIMFILFSVCFFIM

SEQ ID NO: 42 - DNA, 636 bp, Artificial Sequence
  source: /note="Description of Artificial Sequence: Synthetic polynucleotide"
atgggattcgtgcttttctctcagcttccttctttccttcttgtgtctactcttcttcttttccttgtgatttctcactcttgcagggctaaggtgacagttgatactgtgtgcaagaggggtttccttattcagatgtctggacaccttgagtgtaagtgcgagaacgatcttgttcttgtgaacgaagagacttgcgaagagaaggtgttgaagtgcgatgagaaaactgtgaacaagccatgcggagatttctctaagtgcattaagattgatggaaacccagtgtcttatgcttgcaagtgcaaccttggatacgatatggtgaacaatgtgtgcattccaaacgagtgcaagaacgtgacttgcggaaacggaaagtgcattcttgatacttctaacccagttaagactgctgtgtgtagttgcaacattggaaaggtgccaaacgttcaggatcagaacaagtgctctaaggatggtgaaactaagtgctctcttaagtgccttaaagagaacgagacttgcaaggctgtggatggtatttacaagtgcgattgcaaggatggattcattattgataacgagtcatctatctgcactcatcaccatcaccaccacaaggatgagctttga

SEQ ID NO: 43 - protein, 211 aa, Artificial Sequence
  source: /note="Description of Artificial Sequence: Synthetic polypeptide"
MGFVLFSQLPSFLLVSTLLLFLVISHSCRAKVTVDTVCKRGFLIQMSGHLECKCENDLVLVNEETCEEKVLKCDEKTVNKPCGDFSKCIKIDGNPVSYACKCNLGYDMVNNVCIPNECKNVTCGNGKCILDTSNPVKTAVCSCNIGKVPNVQDQNKCSKDGETKCSLKCLKENETCKAVDGIYKCDCKDGFIIDNESSICTHHHHHHKDEL

SEQ ID NO: 44 - DNA, 1305 bp, Artificial Sequence
  source: /note="Description of Artificial Sequence: Synthetic polynucleotide"
atgggatttgttctcttttcacaattgccttcatttcttcttgtctctacacttctcttattcctagtaatatcccactcttgccgtgcccaaaatggaggttcttatccatataagtctggtgagtatagaactaagtctttctttggatatggttattatgaagttaggatgaaggctgcaaagaacgttggaattgtttcttctttctttacttatactggaccatctgataacaacccatgggatgagattgatattgagtttcttggaaaggatactactaaggttcaattcaactggtataagaatggtgttggtggaaacgagtatcttcataaccttggatttgatgcttctcaagattttcatacttatggttttgagtggagaccagattatattgatttttatgttgatggaaagaaggtttatagaggtactagaaacattccagttactcctggaaagattatgatgaatctttggccaggaattggtgttgatgaatggcttggtagatatgatggaagaactccacttcaagctgagtatgagtatgttaagtattatccaaacggtagatctaaggtgacagttgatactgtgtgcaagaggggtttccttattcagatgtctggacaccttgagtgtaagtgcgagaacgatcttgttcttgtgaacgaagagacttgcgaagagaaggtgttgaagtgcgatgagaaaactgtgaacaagccatgcggagatttctctaagtgcattaagattgatggaaacccagtgtcttatgcttgcaagtgcaaccttggatacgatatggtgaacaatgtgtgcattccaaacgagtgcaagaacgtgacttgcggaaacggaaagtgcattcttgatacttctaacccagttaagactgctgtgtgtagttgcaacattggaaaggtgccaaacgttcaggatcagaacaagtgctctaaggatggtgaaactaagtgctctcttaagtgccttaaagagaacgagacttgcaaggctgtggatggtatttacaagtgcgattgcaaggatggattcattattgataacgagtcatctatctgcactaagcttgttgttaatactccatttgttgctgttttctctaactttgattcttctcaatgggaaaaggctgattgggctaacggttctgtttttaactgtgtttggaagccatctcaagttactttttctaacggaaagatgattcttactttggatagagagtatgtcgaccatcatcatcatcatcataaggatgaactttga

SEQ ID NO: 45 - protein, 434 aa, Artificial Sequence
  source: /note="Description of Artificial Sequence: Synthetic polypeptide"
MGFVLFSQLPSFLLVSTLLLFLVISHSCRAQNGGSYPYKSGEYRTKSFFGYGYYEVRMKAAKNVGIVSSFFTYTGPSDNNPWDEIDIEFLGKDTTKVQFNWYKNGVGGNEYLHNLGFDASQDFHTYGFEWRPDYIDFYVDGKKVYRGTRNIPVTPGKIMMNLWPGIGVDEWLGRYDGRTPLQAEYEYVKYYPNGRSKVTVDTVCKRGFLIQMSGHLECKCENDLVLVNEETCEEKVLKCDEKTVNKPCGDFSKCIKIDGNPVSYACKCNLGYDMVNNVCIPNECKNVTCGNGKCILDTSNPVKTAVCSCNIGKVPNVQDQNKCSKDGETKCSLKCLKENETCKAVDGIYKCDCKDGFIIDNESSICTKLVVNTPFVAVFSNFDSSQWEKADWANGSVFNCVWKPSQVTFSNGKMILTLDREYVDHHHHHHKDEL

SEQ ID NO: 46 - DNA, 1311 bp, Artificial Sequence
  source: /note="Description of Artificial Sequence: Synthetic polynucleotide"
atgggatttgttctcttttcacaattgccttcatttcttcttgtctctacacttctcttattcctagtaatatcccactcttgccgtgcccaaaatggaggttcttatccatataagtctggtgagtatagaactaagtctttctttggatatggttattatgaagttaggatgaaggctgcaaagaacgttggaattgtttcttctttctttacttatactggaccatctgataacaacccatgggatgagattgatattgagtttcttggaaaggatactactaaggttcaattcaactggtataagaatggtgttggtggaaacgagtatcttcataaccttggatttgatgcttctcaagattttcatacttatggttttgagtggagaccagattatattgatttttatgttgatggaaagaaggtttatagaggtactagaaacattccagttactcctggaaagattatgatgaatctttggccaggaattggtgttgatgaatggcttggtagatatgatggaagaactccacttcaagctgagtatgagtatgttaagtattatccaaacggtagatctgaattcaagcttgttgttaatactccatttgttgctgttttctctaactttgattcttctcaatgggaaaaggctgattgggctaacggttctgtttttaactgtgtttggaagccatctcaagttactttttctaacggaaagatgattcttactttggatagagagtatgtcgacaaggtgacagttgatactgtgtgcaagaggggtttccttattcagatgtctggacaccttgagtgtaagtgcgagaacgatcttgttcttgtgaacgaagagacttgcgaagagaaggtgttgaagtgcgatgagaaaactgtgaacaagccatgcggagatttctctaagtgcattaagattgatggaaacccagtgtcttatgcttgcaagtgcaaccttggatacgatatggtgaacaatgtgtgcattccaaacgagtgcaagaacgtgacttgcggaaacggaaagtgcattcttgatacttctaacccagttaagactgctgtgtgtagttgcaacattggaaaggtgccaaacgttcaggatcagaacaagtgctctaaggatggtgaaactaagtgctctcttaagtgccttaaagagaacgagacttgcaaggctgtggatggtatttacaagtgcgattgcaaggatggattcattattgataacgagtcatctatctgcactcatcaccatcaccaccacaaggatgagctttga

SEQ ID NO: 47 - protein, 436 aa, Artificial Sequence
  source: /note="Description of Artificial Sequence: Synthetic polypeptide"
MGFVLFSQLPSFLLVSTLLLFLVISHSCRAQNGGSYPYKSGEYRTKSFFGYGYYEVRMKAAKNVGIVSSFFTYTGPSDNNPWDEIDIEFLGKDTTKVQFNWYKNGVGGNEYLHNLGFDASQDFHTYGFEWRPDYIDFYVDGKKVYRGTRNIPVTPGKIMMNLWPGIGVDEWLGRYDGRTPLQAEYEYVKYYPNGRSEFKLVVNTPFVAVFSNFDSSQWEKADWANGSVFNCVWKPSQVTFSNGKMILTLDREYVDKVTVDTVCKRGFLIQMSGHLECKCENDLVLVNEETCEEKVLKCDEKTVNKPCGDFSKCIKIDGNPVSYACKCNLGYDMVNNVCIPNECKNVTCGNGKCILDTSNPVKTAVCSCNIGKVPNVQDQNKCSKDGETKCSLKCLKENETCKAVDGIYKCDCKDGFIIDNESSICTHHHHHHKDEL

SEQ ID NO: 48 - DNA, 636 bp, Artificial Sequence
  source: /note="Description of Artificial Sequence: Synthetic polynucleotide"
atgggattcgtgcttttctctcagcttccttctttccttcttgtgtctactcttcttcttttccttgtgatttctcactcttgcagggctaaggtgacagttgatactgtgtgcaagaggggtttccttattcagatgtctggacaccttgagtgtaagtgcgagaacgatcttgttcttgtgaacgaagagacttgcgaagagaaggtgttgaagtgcgatgagaaaactgtgaacaagccatgcggagatttctctaagtgcattaagattgatggaaacccagtgtcttatgcttgcaagtgcaaccttggatacgatatggtgaacaatgtgtgcattccaaacgagtgcaagcaagtgacttgcggaaacggaaagtgcattcttgatacttctaacccagttaagactgctgtgtgtagttgcaacattggaaaggtgccaaacgttcaggatcagaacaagtgctctaaggatggtgaaactaagtgctctcttaagtgccttaaagagaacgagacttgcaaggctgtggatggtatttacaagtgcgattgcaaggatggattcattattgatcaagagtcatctatctgcactcatcaccatcaccaccacaaggatgagctttga

SEQ ID NO: 49 - protein, 211 aa, Artificial Sequence
  source: /note="Description of Artificial Sequence: Synthetic polypeptide"
MGFVLFSQLPSFLLVSTLLLFLVISHSCRAKVTVDTVCKRGFLIQMSGHLECKCENDLVLVNEETCEEKVLKCDEKTVNKPCGDFSKCIKIDGNPVSYACKCNLGYDMVNNVCIPNECKQVTCGNGKCILDTSNPVKTAVCSCNIGKVPNVQDQNKCSKDGETKCSLKCLKENETCKAVDGIYKCDCKDGFIIDQESSICTHHHHHHKDEL

SEQ ID NO: 50 - DNA, 1305 bp, Artificial Sequence
  source: /note="Description of Artificial Sequence: Synthetic polynucleotide"
atgggatttgttctcttttcacaattgccttcatttcttcttgtctctacacttctcttattcctagtaatatcccactcttgccgtgcccaaaatggaggttcttatccatataagtctggtgagtatagaactaagtctttctttggatatggttattatgaagttaggatgaaggctgcaaagaacgttggaattgtttcttctttctttacttatactggaccatctgataacaacccatgggatgagattgatattgagtttcttggaaaggatactactaaggttcaattcaactggtataagaatggtgttggtggaaacgagtatcttcataaccttggatttgatgcttctcaagattttcatacttatggttttgagtggagaccagattatattgatttttatgttgatggaaagaaggtttatagaggtactagaaacattccagttactcctggaaagattatgatgaatctttggccaggaattggtgttgatgaatggcttggtagatatgatggaagaactccacttcaagctgagtatgagtatgttaagtattatccaaacggtagatctaaggtgacagttgatactgtgtgcaagaggggtttccttattcagatgtctggacaccttgagtgtaagtgcgagaacgatcttgttcttgtgaacgaagagacttgcgaagagaaggtgttgaagtgcgatgagaaaactgtgaacaagccatgcggagatttctctaagtgcattaagattgatggaaacccagtgtcttatgcttgcaagtgcaaccttggatacgatatggtgaacaatgtgtgcattccaaacgagtgcaagcaagtgacttgcggaaacggaaagtgcattcttgatacttctaacccagttaagactgctgtgtgtagttgcaacattggaaaggtgccaaacgttcaggatcagaacaagtgctctaaggatggtgaaactaagtgctctcttaagtgccttaaagagaacgagacttgcaaggctgtggatggtatttacaagtgcgattgcaaggatggattcattattgatcaagagtcatctatctgcactaagcttgttgttaatactccatttgttgctgttttctctaactttgattcttctcaatgggaaaaggctgattgggctaacggttctgtttttaactgtgtttggaagccatctcaagttactttttctaacggaaagatgattcttactttggatagagagtatgtcgaccatcatcatcatcatcataaggatgaactttga

SEQ ID NO: 51 - protein, 434 aa, Artificial Sequence
  source: /note="Description of Artificial Sequence: Synthetic polypeptide"
MGFVLFSQLPSFLLVSTLLLFLVISHSCRAQNGGSYPYKSGEYRTKSFFGYGYYEVRMKAAKNVGIVSSFFTYTGPSDNNPWDEIDIEFLGKDTTKVQFNWYKNGVGGNEYLHNLGFDASQDFHTYGFEWRPDYIDFYVDGKKVYRGTRNIPVTPGKIMMNLWPGIGVDEWLGRYDGRTPLQAEYEYVKYYPNGRSKVTVDTVCKRGFLIQMSGHLECKCENDLVLVNEETCEEKVLKCDEKTVNKPCGDFSKCIKIDGNPVSYACKCNLGYDMVNNVCIPNECKQVTCGNGKCILDTSNPVKTAVCSCNIGKVPNVQDQNKCSKDGETKCSLKCLKENETCKAVDGIYKCDCKDGFIIDQESSICTKLVVNTPFVAVFSNFDSSQWEKADWANGSVFNCVWKPSQVTFSNGKMILTLDREYVDHHHHHHKDEL

SEQ ID NO: 52 - DNA, 1317 bp, Artificial Sequence
  source: /note="Description of Artificial Sequence: Synthetic polynucleotide"
atgggatttgttctcttttcacaattgccttcatttcttcttgtctctacacttctcttattcctagtaatatcccactcttgccgtgcccaaaatggaggttcttatccatataagtctggtgagtatagaactaagtctttctttggatatggttattatgaagttaggatgaaggctgcaaagaacgttggaattgtttcttctttctttacttatactggaccatctgataacaacccatgggatgagattgatattgagtttcttggaaaggatactactaaggttcaattcaactggtataagaatggtgttggtggaaacgagtatcttcataaccttggatttgatgcttctcaagattttcatacttatggttttgagtggagaccagattatattgatttttatgttgatggaaagaaggtttatagaggtactagaaacattccagttactcctggaaagattatgatgaatctttggccaggaattggtgttgatgaatggcttggtagatatgatggaagaactccacttcaagctgagtatgagtatgttaagtattatccaaacggtagatctgaattcaagcttgttgttaatactccatttgttgctgttttctctaactttgattcttctcaatgggaaaaggctgattgggctaacggttctgtttttaactgtgtttggaagccatctcaagttactttttctaacggaaagatgattcttactttggatagagagtatgtcgacaaggtgacagttgatactgtgtgcaagaggggtttccttattcagatgtctggacaccttgagtgtaagtgcgagaacgatcttgttcttgtgaacgaagagacttgcgaagagaaggtgttgaagtgcgatgagaaaactgtgaacaagccatgcggagatttctctaagtgcattaagattgatggaaacccagtgtcttatgcttgcaagtgcaaccttggatacgatatggtgaacaatgtgtgcattccaaacgagtgcaagcaagtgacttgcggaaacggaaagtgcattcttgatacttctaacccagttaagactgctgtgtgtagttgcaacattggaaaggtgccaaacgttcaggatcagaacaagtgctctaaggatggtgaaactaagtgctctcttaagtgccttaaagagaacgagacttgcaaggctgtggatggtatttacaagtgcgattgcaaggatggattcattattgatcaagagtcatctatctgcactgtcgaccatcatcatcatcatcataaggatgaactttga

SEQ ID NO: 53 - protein, 438 aa, Artificial Sequence
  source: /note="Description of Artificial Sequence: Synthetic polypeptide"
MGFVLFSQLPSFLLVSTLLLFLVISHSCRAQNGGSYPYKSGEYRTKSFFGYGYYEVRMKAAKNVGIVSSFFTYTGPSDNNPWDEIDIEFLGKDTTKVQFNWYKNGVGGNEYLHNLGFDASQDFHTYGFEWRPDYIDFYVDGKKVYRGTRNIPVTPGKIMMNLWPGIGVDEWLGRYDGRTPLQAEYEYVKYYPNGRSEFKLVVNTPFVAVFSNFDSSQWEKADWANGSVFNCVWKPSQVTFSNGKMILTLDREYVDKVTVDTVCKRGFLIQMSGHLECKCENDLVLVNEETCEEKVLKCDEKTVNKPCGDFSKCIKIDGNPVSYACKCNLGYDMVNNVCIPNECKQVTCGNGKCILDTSNPVKTAVCSCNIGKVPNVQDQNKCSKDGETKCSLKCLKENETCKAVDGIYKCDCKDGFIIDQESSICTVDHHHHHHKDEL

SEQ ID NO: 54 - DNA, 648 bp, Artificial Sequence
  source: /note="Description of Artificial Sequence: Synthetic polynucleotide"
atgggattcgtgcttttctctcagcttccttctttccttcttgtgtctactcttcttcttttccttgtgatttctcactcttgcagggctagagttactgagaacactatctgcaagtacggataccttattcagatgtctaaccactacgagtgcaagtgtattgagggatacgtgcttattaacgaggatacttgcggaaagaaagttgtgtgcgataaggtggagaactctttcaaggcttgcgatgagtacgcttactgcttcgatcttggaaacaagaacaacgagaagcagattaagtgcatgtgcaggactgagtacactcttactgctggtgtttgcgttccaaatgtgtgcagggataaagtttgcggaaagggaaagtgcattgtggacccagctaactctcttactcacacttgctcttgcaacattggaactattcttaaccagaacaagttgtgcgatattcagggtgatactccatgctctcttaagtgcgctgagaacgaagtgtgtactcttgagggaaactactacacttgcaaagaagatccatcttctaacggtggaggaaacactgttgatcaggctgatacttcttactctgtgcatcatcaccatcaccacaaggatgagctttga

SEQ ID NO: 55 - protein, 218 aa, Plasmodium falciparum
MNTYFKVLLFLFIQLYITLNKARVTENTICKYGYLIQMSNHYECKCIEGYVLINEDTCGKKVVCDKVENSFKACDEYAYCFDLGNKNNEKQIKCMCRTEYTLTAGVCVPNVCRDKVCGKGKCIVDPANSLTHTCSCNIGTILNQNKLCDIQGDTPCSLKCAENEVCTLEGNYYTCKEDPSSNGGGNTVDQADTSYSVINGVTLTHVLIVCSIFIKLLI

SEQ ID NO: 56 - protein, 215 aa, Artificial Sequence
  source: /note="Description of Artificial Sequence: Synthetic polypeptide"
MGFVLFSQLPSFLLVSTLLLFLVISHSCRARVTENTICKYGYLIQMSNHYECKCIEGYVLINEDTCGKKVVCDKVENSFKACDEYAYCFDLGNKNNEKQIKCMCRTEYTLTAGVCVPNVCRDKVCGKGKCIVDPANSLTHTCSCNIGTILNQNKLCDIQGDTPCSLKCAENEVCTLEGNYYTCKEDPSSNGGGNTVDQADTSYSVHHHHHHKDEL

SEQ ID NO: 57 - DNA, 1317 bp, Artificial Sequence
  source: /note="Description of Artificial Sequence: Synthetic polynucleotide"
atgggatttgttctcttttcacaattgccttcatttcttcttgtctctacacttctcttattcctagtaatatcccactcttgccgtgcccaaaatggaggttcttatccatataagtctggtgagtatagaactaagtctttctttggatatggttattatgaagttaggatgaaggctgcaaagaacgttggaattgtttcttctttctttacttatactggaccatctgataacaacccatgggatgagattgatattgagtttcttggaaaggatactactaaggttcaattcaactggtataagaatggtgttggtggaaacgagtatcttcataaccttggatttgatgcttctcaagattttcatacttatggttttgagtggagaccagattatattgatttttatgttgatggaaagaaggtttatagaggtactagaaacattccagttactcctggaaagattatgatgaatctttggccaggaattggtgttgatgaatggcttggtagatatgatggaagaactccacttcaagctgagtatgagtatgttaagtattatccaaacggtagatctagagttactgagaacactatctgcaagtacggataccttattcagatgtctaaccactacgagtgcaagtgtattgagggatacgtgcttattaacgaggatacttgcggaaagaaagttgtgtgcgataaggtggagaactctttcaaggcttgcgatgagtacgcttactgcttcgatcttggaaacaagaacaacgagaagcagattaagtgcatgtgcaggactgagtacactcttactgctggtgtttgcgttccaaatgtgtgcagggataaagtttgcggaaagggaaagtgcattgtggacccagctaactctcttactcacacttgctcttgcaacattggaactattcttaaccagaacaagttgtgcgatattcagggtgatactccatgctctcttaagtgcgctgagaacgaagtgtgtactcttgagggaaactactacacttgcaaagaagatccatcttctaacggtggaggaaacactgttgatcaggctgatacttcttactctgtgaagcttgttgttaatactccatttgttgctgttttctctaactttgattcttctcaatgggaaaaggctgattgggctaacggttctgtttttaactgtgtttggaagccatctcaagttactttttctaacggaaagatgattcttactttggatagagagtatgtcgaccatcatcatcatcatcataaggatgaactttga

SEQ ID NO: 58 - protein, 438 aa, Artificial Sequence
  source: /note="Description of Artificial Sequence: Synthetic polypeptide"
MGFVLFSQLPSFLLVSTLLLFLVISHSCRAQNGGSYPYKSGEYRTKSFFGYGYYEVRMKAAKNVGIVSSFFTYTGPSDNNPWDEIDIEFLGKDTTKVQFNWYKNGVGGNEYLHNLGFDASQDFHTYGFEWRPDYIDFYVDGKKVYRGTRNIPVTPGKIMMNLWPGIGVDEWLGRYDGRTPLQAEYEYVKYYPNGRSRVTENTICKYGYLIQMSNHYECKCIEGYVLINEDTCGKKVVCDKVENSFKACDEYAYCFDLGNKNNEKQIKCMCRTEYTLTAGVCVPNVCRDKVCGKGKCIVDPANSLTHTCSCNIGTILNQNKLCDIQGDTPCSLKCAENEVCTLEGNYYTCKEDPSSNGGGNTVDQADTSYSVKLVVNTPFVAVFSNFDSSQWEKADWANGSVFNCVWKPSQVTFSNGKMILTLDREYVDHHHHHHKDEL

SEQ ID NO: 59 - DNA, 1329 bp, Artificial Sequence
  source: /note="Description of Artificial Sequence: Synthetic polynucleotide"
atgggatttgttctcttttcacaattgccttcatttcttcttgtctctacacttctcttattcctagtaatatcccactcttgccgtgcccaaaatggaggttcttatccatataagtctggtgagtatagaactaagtctttctttggatatggttattatgaagttaggatgaaggctgcaaagaacgttggaattgtttcttctttctttacttatactggaccatctgataacaacccatgggatgagattgatattgagtttcttggaaaggatactactaaggttcaattcaactggtataagaatggtgttggtggaaacgagtatcttcataaccttggatttgatgcttctcaagattttcatacttatggttttgagtggagaccagattatattgatttttatgttgatggaaagaaggtttatagaggtactagaaacattccagttactcctggaaagattatgatgaatctttggccaggaattggtgttgatgaatggcttggtagatatgatggaagaactccacttcaagctgagtatgagtatgttaagtattatccaaacggtagatctgaattcaagcttgttgttaatactccatttgttgctgttttctctaactttgattcttctcaatgggaaaaggctgattgggctaacggttctgtttttaactgtgtttggaagccatctcaagttactttttctaacggaaagatgattcttactttggatagagagtatgtcgacagagttactgagaacactatctgcaagtacggataccttattcagatgtctaaccactacgagtgcaagtgtattgagggatacgtgcttattaacgaggatacttgcggaaagaaagttgtgtgcgataaggtggagaactctttcaaggcttgcgatgagtacgcttactgcttcgatcttggaaacaagaacaacgagaagcagattaagtgcatgtgcaggactgagtacactcttactgctggtgtttgcgttccaaatgtgtgcagggataaagtttgcggaaagggaaagtgcattgtggacccagctaactctcttactcacacttgctcttgcaacattggaactattcttaaccagaacaagttgtgcgatattcagggtgatactccatgctctcttaagtgcgctgagaacgaagtgtgtactcttgagggaaactactacacttgcaaagaagatccatcttctaacggtggaggaaacactgttgatcaggctgatacttcttactctgtggtcgaccatcatcatcatcatcataaggatgaactttga

SEQ ID NO: 60 - protein, 442 aa, Artificial Sequence
  source: /note="Description of Artificial Sequence: Synthetic polypeptide"
MGFVLFSQLPSFLLVSTLLLFLVISHSCRAQNGGSYPYKSGEYRTKSFFGYGYYEVRMKAAKNVGIVSSFFTYTGPSDNNPWDEIDIEFLGKDTTKVQFNWYKNGVGGNEYLHNLGFDASQDFHTYGFEWRPDYIDFYVDGKKVYRGTRNIPVTPGKIMMNLWPGIGVDEWLGRYDGRTPLQAEYEYVKYYPNGRSEFKLVVNTPFVAVFSNFDSSQWEKADWANGSVFNCVWKPSQVTFSNGKMILTLDREYVDRVTENTICKYGYLIQMSNHYECKCIEGYVLINEDTCGKKVVCDKVENSFKACDEYAYCFDLGNKNNEKQIKCMCRTEYTLTAGVCVPNVCRDKVCGKGKCIVDPANSLTHTCSCNIGTILNQNKLCDIQGDTPCSLKCAENEVCTLEGNYYTCKEDPSSNGGGNTVDQADTSYSVVDHHHHHHKDEL

SEQ ID NO: 61 - DNA, 1326 bp, Artificial Sequence
  source: /note="Description of Artificial Sequence: Synthetic polynucleotide"
atgggattcgtgcttttctctcagcttccttctttccttcttgtgtctactcttcttcttttccttgtgatttctcactcttgtagggctaacaacgatttctgcaagccatcttctcttaactctgagatttctggattcattggatacaagtgcaacttctctaacgagggtgttcacaaccttaagccagatatgagagagagaagatcaattttctgcactattcactcttacttcatttacgataagattaggcttattattccaaagaagtcatcttctccagagttcaagattcttccagagaagtgcttccagaaggtgtacactgattacgagaacagggtggagactgatatttctgagcttggacttattgagtacgagattgaagagaacgatacaaacccaaactacaacgagaggactattactatttctccattctctccaaaggatattgagttcttctgcttctgcgataacactgagaaagtgatttcttctattgagggaagatcagctatggttcatgtgagggtgttgaagtacccacacaacattcttttcactaaccttactaacgatcttttcacttacttgccaaagacttacaacgagtctaacttcgtgtctaacgtgcttgaggtggagcttaatgatggtgagttgttcgttcttgcttgcgagcttattaacaagaagtgtttccaagagggaaaagagaaggctctttacaagtctaacaagattatttaccacaagaaccttactattttcaaggctccattctacgtgacttctaaggatgtgaacactgagtgcacttgcaagttcaagaacaacaactacaagattgtgcttaagccaaagtacgagaagaaagtgattcacggatgcaacttctcatctaacgtgtcatctaagcacactttcactgattctcttgatatttctcttgtggatgattctgctcacatttcttgcaacgtgcacctttctgagccaaagtacaaccaccttgtgggacttaattgcccaggtgatattattccagattgcttcttccaggtttaccaaccagagtctgaagaacttgagccatctaacattgtgtaccttgattctcagattaacattggagatattgagtactacgaggatgctgagggtgatgataagattaagttgttcggaattgtgggatctattccaaagactacttctttcacttgcatctgcaagaaggataagaaatctgcttacatgactgtgactattgattcagctcatcaccatcaccaccacaaggatgagctttga

SEQ ID NO: 62 - protein, 448 aa, Plasmodium falciparum
MMLYISAKKAQVAFILYIVLVLRIISGNNDFCKPSSLNSEISGFIGYKCNFSNEGVHNLKPDMRERRSIFCTIHSYFIYDKIRLIIPKKSSSPEFKILPEKCFQKVYTDYENRVETDISELGLIEYEIEENDTNPNYNERTITISPFSPKDIEFFCFCDNTEKVISSIEGRSAMVHVRVLKYPHNILFTNLTNDLFTYLPKTYNESNFVSNVLEVELNDGELFVLACELINKKCFQEGKEKALYKSNKIIYHKNLTIFKAPFYVTSKDVNTECTCKFKNNNYKIVLKPKYEKKVIHGCNFSSNVSSKHTFTDSLDISLVDDSAHISCNVHLSEPKYNHLVGLNCPGDIIPDCFFQVYQPESEELEPSNIVYLDSQINIGDIEYYEDAEGDDKIKLFGIVGSIPKTTSFTCICKKDKKSAYMTVTIDSAYYGFLAKTFIFLIVAILLYI

SEQ ID NO: 63 - protein, 441 aa, Artificial Sequence
  source: /note="Description of Artificial Sequence: Synthetic polypeptide"
MGFVLFSQLPSFLLVSTLLLFLVISHSCRANNDFCKPSSLNSEISGFIGYKCNFSNEGVHNLKPDMRERRSIFCTIHSYFIYDKIRLIIPKKSSSPEFKILPEKCFQKVYTDYENRVETDISELGLIEYEIEENDTNPNYNERTITISPFSPKDIEFFCFCDNTEKVISSIEGRSAMVHVRVLKYPHNILFTNLTNDLFTYLPKTYNESNFVSNVLEVELNDGELFVLACELINKKCFQEGKEKALYKSNKIIYHKNLTIFKAPFYVTSKDVNTECTCKFKNNNYKIVLKPKYEKKVIHGCNFSSNVSSKHTFTDSLDISLVDDSAHISCNVHLSEPKYNHLVGLNCPGDIIPDCFFQVYQPESEELEPSNIVYLDSQINIGDIEYYEDAEGDDKIKLFGIVGSIPKTTSFTCICKKDKKSAYMTVTIDSAHHHHHHKDEL

SEQ ID NO: 64 - DNA, 1995 bp, Artificial Sequence
  source: /note="Description of Artificial Sequence: Synthetic polynucleotide"
atgggatttgttctcttttcacaattgccttcatttcttcttgtctctacacttctcttattcctagtaatatcccactcttgccgtgcccaaaatggaggttcttatccatataagtctggtgagtatagaactaagtctttctttggatatggttattatgaagttaggatgaaggctgcaaagaacgttggaattgtttcttctttctttacttatactggaccatctgataacaacccatgggatgagattgatattgagtttcttggaaaggatactactaaggttcaattcaactggtataagaatggtgttggtggaaacgagtatcttcataaccttggatttgatgcttctcaagattttcatacttatggttttgagtggagaccagattatattgatttttatgttgatggaaagaaggtttatagaggtactagaaacattccagttactcctggaaagattatgatgaatctttggccaggaattggtgttgatgaatggcttggtagatatgatggaagaactccacttcaagctgagtatgagtatgttaagtattatccaaacggtagatctaacaacgatttctgcaagccatcttctcttaactctgagatttctggattcattggatacaagtgcaacttctctaacgagggtgttcacaaccttaagccagatatgagagagagaagatcaattttctgcactattcactcttacttcatttacgataagattaggcttattattccaaagaagtcatcttctccagagttcaagattcttccagagaagtgcttccagaaggtgtacactgattacgagaacagggtggagactgatatttctgagcttggacttattgagtacgagattgaagagaacgatacaaacccaaactacaacgagaggactattactatttctccattctctccaaaggatattgagttcttctgcttctgcgataacactgagaaagtgatttcttctattgagggaagatcagctatggttcatgtgagggtgttgaagtacccacacaacattcttttcactaaccttactaacgatcttttcacttacttgccaaagacttacaacgagtctaacttcgtgtctaacgtgcttgaggtggagcttaatgatggtgagttgttcgttcttgcttgcgagcttattaacaagaagtgtttccaagagggaaaagagaaggctctttacaagtctaacaagattatttaccacaagaaccttactattttcaaggctccattctacgtgacttctaaggatgtgaacactgagtgcacttgcaagttcaagaacaacaactacaagattgtgcttaagccaaagtacgagaagaaagtgattcacggatgcaacttctcatctaacgtgtcatctaagcacactttcactgattctcttgatatttctcttgtggatgattctgctcacatttcttgcaacgtgcacctttctgagccaaagtacaaccaccttgtgggacttaattgcccaggtgatattattccagattgcttcttccaggtttaccaaccagagtctgaagaacttgagccatctaacattgtgtaccttgattctcagattaacattggagatattgagtactacgaggatgctgagggtgatgataagattaagttgttcggaattgtgggatctattccaaagactacttctttcacttgcatctgcaagaaggataagaaatctgcttacatgactgtgactattgattcagctaagcttgttgttaatactccatttgttgctgttttctctaactttgattcttctcaatgggaaaaggctgattgggctaacggttctgtttttaactgtgtttggaagccatctcaagttactttttctaacggaaagatgattcttactttggatagagagtatgtcgaccatcatcatcatcatcataaggatgaactttga

SEQ ID NO: 65 - protein, 664 aa, Artificial Sequence
  source: /note="Description of Artificial Sequence: Synthetic polypeptide"
MGFVLFSQLPSFLLVSTLLLFLVISHSCRAQNGGSYPYKSGEYRTKSFFGYGYYEVRMKAAKNVGIVSSFFTYTGPSDNNPWDEIDIEFLGKDTTKVQFNWYKNGVGGNEYLHNLGFDASQDFHTYGFEWRPDYIDFYVDGKKVYRGTRNIPVTPGKIMMNLWPGIGVDEWLGRYDGRTPLQAEYEYVKYYPNGRSNNDFCKPSSLNSEISGFIGYKCNFSNEGVHNLKPDMRERRSIFCTIHSYFIYDKIRLIIPKKSSSPEFKILPEKCFQKVYTDYENRVETDISELGLIEYEIEENDTNPNYNERTITISPFSPKDIEFFCFCDNTEKVISSIEGRSAMVHVRVLKYPHNILFTNLTNDLFTYLPKTYNESNFVSNVLEVELNDGELFVLACELINKKCFQEGKEKALYKSNKIIYHKNLTIFKAPFYVTSKDVNTECTCKFKNNNYKIVLKPKYEKKVIHGCNFSSNVSSKHTFTDSLDISLVDDSAHISCNVHLSEPKYNHLVGLNCPGDIIPDCFFQVYQPESEELEPSNIVYLDSQINIGDIEYYEDAEGDDKIKLFGIVGSIPKTTSFTCICKKDKKSAYMTVTIDSAKLVVNTPFVAVFSNFDSSQWEKADWANGSVFNCVWKPSQVTFSNGKMILTLDREYVDHHHHHHKDEL

SEQ ID NO: 66 - DNA, 2007 bp, Artificial Sequence
  source: /note="Description of Artificial Sequence: Synthetic polynucleotide"
atgggatttgttctcttttcacaattgccttcatttcttcttgtctctacacttctcttattcctagtaatatcccactcttgccgtgcccaaaatggaggttcttatccatataagtctggtgagtatagaactaagtctttctttggatatggttattatgaagttaggatgaaggctgcaaagaacgttggaattgtttcttctttctttacttatactggaccatctgataacaacccatgggatgagattgatattgagtttcttggaaaggatactactaaggttcaattcaactggtataagaatggtgttggtggaaacgagtatcttcataaccttggatttgatgcttctcaagattttcatacttatggttttgagtggagaccagattatattgatttttatgttgatggaaagaaggtttatagaggtactagaaacattccagttactcctggaaagattatgatgaatctttggccaggaattggtgttgatgaatggcttggtagatatgatggaagaactccacttcaagctgagtatgagtatgttaagtattatccaaacggtagatctgaattcaagcttgttgttaatactccatttgttgctgttttctctaactttgattcttctcaatgggaaaaggctgattgggctaacggttctgtttttaactgtgtttggaagccatctcaagttactttttctaacggaaagatgattcttactttggatagagagtatgtcgacaacaacgatttctgcaagccatcttctcttaactctgagatttctggattcattggatacaagtgcaacttctctaacgagggtgttcacaaccttaagccagatatgagagagagaagatcaattttctgcactattcactcttacttcatttacgataagattaggcttattattccaaagaagtcatcttctccagagttcaagattcttccagagaagtgcttccagaaggtgtacactgattacgagaacagggtggagactgatatttctgagcttggacttattgagtacgagattgaagagaacgatacaaacccaaactacaacgagaggactattactatttctccattctctccaaaggatattgagttcttctgcttctgcgataacactgagaaagtgatttcttctattgagggaagatcagctatggttcatgtgagggtgttgaagtacccacacaacattcttttcactaaccttactaacgatcttttcacttacttgccaaagacttacaacgagtctaacttcgtgtctaacgtgcttgaggtggagcttaatgatggtgagttgttcgttcttgcttgcgagcttattaacaagaagtgtttccaagagggaaaagagaaggctctttacaagtctaacaagattatttaccacaagaaccttactattttcaaggctccattctacgtgacttctaaggatgtgaacactgagtgcacttgcaagttcaagaacaacaactacaagattgtgcttaagccaaagtacgagaagaaagtgattcacggatgcaacttctcatctaacgtgtcatctaagcacactttcactgattctcttgatatttctcttgtggatgattctgctcacatttcttgcaacgtgcacctttctgagccaaagtacaaccaccttgtgggacttaattgcccaggtgatattattccagattgcttcttccaggtttaccaaccagagtctgaagaacttgagccatctaacattgtgtaccttgattctcagattaacattggagatattgagtactacgaggatgctgagggtgatgataagattaagttgttcggaattgtgggatctattccaaagactacttctttcacttgcatctgcaagaaggataagaaatctgcttacatgactgtgactattgattcagctgtcgaccatcatcatcatcatcataaggatgaactttga

SEQ ID NO: 67 - protein, 668 aa, Artificial Sequence
  source: /note="Description of Artificial Sequence: Synthetic polypeptide"
MGFVLFSQLPSFLLVSTLLLFLVISHSCRAQNGGSYPYKSGEYRTKSFFGYGYYEVRMKAAKNVGIVSSFFTYTGPSDNNPWDEIDIEFLGKDTTKVQFNWYKNGVGGNEYLHNLGFDASQDFHTYGFEWRPDYIDFYVDGKKVYRGTRNIPVTPGKIMMNLWPGIGVDEWLGRYDGRTPLQAEYEYVKYYPNGRSEFKLVVNTPFVAVFSNFDSSQWEKADWANGSVFNCVWKPSQVTFSNGKMILTLDREYVDNNDFCKPSSLNSEISGFIGYKCNFSNEGVHNLKPDMRERRSIFCTIHSYFIYDKIRLIIPKKSSSPEFKILPEKCFQKVYTDYENRVETDISELGLIEYEIEENDTNPNYNERTITISPFSPKDIEFFCFCDNTEKVISSIEGRSAMVHVRVLKYPHNILFTNLTNDLFTYLPKTYNESNFVSNVLEVELNDGELFVLACELINKKCFQEGKEKALYKSNKIIYHKNLTIFKAPFYVTSKDVNTECTCKFKNNNYKIVLKPKYEKKVIHGCNFSSNVSSKHTFTDSLDISLVDDSAHISCNVHLSEPKYNHLVGLNCPGDIIPDCFFQVYQPESEELEPSNIVYLDSQINIGDIEYYEDAEGDDKIKLFGIVGSIPKTTSFTCICKKDKKSAYMTVTIDSAVDHHHHHHKDEL

SEQ ID NO: 68 - DNA, 1326 bp, Artificial Sequence
  source: /note="Description of Artificial Sequence: Synthetic polynucleotide"
atgggattcgtgcttttctctcagcttccttctttccttcttgtgtctactcttcttcttttccttgtgatttctcactcttgtagggctaacaacgatttctgcaagccatcttctcttaactctgagatttctggattcattggatacaagtgcaacttctctaacgagggtgttcacaaccttaagccagatatgagagagagaagatcaattttctgcactattcactcttacttcatttacgataagattaggcttattattccaaagaagtcatcttctccagagttcaagattcttccagagaagtgcttccagaaggtgtacactgattacgagaacagggtggagactgatatttctgagcttggacttattgagtacgagattgaagagcaagatacaaacccaaactacaacgagaggactattactatttctccattctctccaaaggatattgagttcttctgcttctgcgataacactgagaaagtgatttcttctattgagggaagatcagctatggttcatgtgagggtgttgaagtacccacacaacattcttttcactcaacttactaacgatcttttcacttacttgccaaagacttaccaagagtctaacttcgtgtctaacgtgcttgaggtggagcttaatgatggtgagttgttcgttcttgcttgcgagcttattaacaagaagtgtttccaagagggaaaagagaaggctctttacaagtctaacaagattatttaccacaagaaccttactattttcaaggctccattctacgtgacttctaaggatgtgaacactgagtgcacttgcaagttcaagaacaacaactacaagattgtgcttaagccaaagtacgagaagaaagtgattcacggatgcaacttctcatctcaagtgtcatctaagcacactttcactgattctcttgatatttctcttgtggatgattctgctcacatttcttgcaacgtgcacctttctgagccaaagtacaaccaccttgtgggacttaattgcccaggtgatattattccagattgcttcttccaggtttaccaaccagagtctgaagaacttgagccatctaacattgtgtaccttgattctcagattaacattggagatattgagtactacgaggatgctgagggtgatgataagattaagttgttcggaattgtgggatctattccaaagactacttctttcacttgcatctgcaagaaggataagaaatctgcttacatgactgtgactattgattcagctcatcaccatcaccaccacaaggatgagctttga

SEQ ID NO: 69 - protein, 441 aa, Artificial Sequence
  source: /note="Description of Artificial Sequence: Synthetic polypeptide"
MGFVLFSQLPSFLLVSTLLLFLVISHSCRANNDFCKPSSLNSEISGFIGYKCNFSNEGVHNLKPDMRERRSIFCTIHSYFIYDKIRLIIPKKSSSPEFKILPEKCFQKVYTDYENRVETDISELGLIEYEIEEQDTNPNYNERTITISPFSPKDIEFFCFCDNTEKVISSIEGRSAMVHVRVLKYPHNILFTQLTNDLFTYLPKTYQESNFVSNVLEVELNDGELFVLACELINKKCFQEGKEKALYKSNKIIYHKNLTIFKAPFYVTSKDVNTECTCKFKNNNYKIVLKPKYEKKVIHGCNFSSQVSSKHTFTDSLDISLVDDSAHISCNVHLSEPKYNHLVGLNCPGDIIPDCFFQVYQPESEELEPSNIVYLDSQINIGDIEYYEDAEGDDKIKLFGIVGSIPKTTSFTCICKKDKKSAYMTVTIDSAHHHHHHKDEL

SEQ ID NO: 70 - DNA, 1995 bp, Artificial Sequence
  source: /note="Description of Artificial Sequence: Synthetic polynucleotide"
atgggatttgttctcttttcacaattgccttcatttcttcttgtctctacacttctcttattcctagtaatatcccactcttgccgtgcccaaaatggaggttcttatccatataagtctggtgagtatagaactaagtctttctttggatatggttattatgaagttaggatgaaggctgcaaagaacgttggaattgtttcttctttctttacttatactggaccatctgataacaacccatgggatgagattgatattgagtttcttggaaaggatactactaaggttcaattcaactggtataagaatggtgttggtggaaacgagtatcttcataaccttggatttgatgcttctcaagattttcatacttatggttttgagtggagaccagattatattgatttttatgttgatggaaagaaggtttatagaggtactagaaacattccagttactcctggaaagattatgatgaatctttggccaggaattggtgttgatgaatggcttggtagatatgatggaagaactccacttcaagctgagtatgagtatgttaagtattatccaaacggtagatctaacaacgatttctgcaagccatcttctcttaactctgagatttctggattcattggatacaagtgcaacttctctaacgagggtgttcacaaccttaagccagatatgagagagagaagatcaattttctgcactattcactcttacttcatttacgataagattaggcttattattccaaagaagtcatcttctccagagttcaagattcttccagagaagtgcttccagaaggtgtacactgattacgagaacagggtggagactgatatttctgagcttggacttattgagtacgagattgaagagcaagatacaaacccaaactacaacgagaggactattactatttctccattctctccaaaggatattgagttcttctgcttctgcgataacactgagaaagtgatttcttctattgagggaagatcagctatggttcatgtgagggtgttgaagtacccacacaacattcttttcactcaacttactaacgatcttttcacttacttgccaaagacttaccaagagtctaacttcgtgtctaacgtgcttgaggtggagcttaatgatggtgagttgttcgttcttgcttgcgagcttattaacaagaagtgtttccaagagggaaaagagaaggctctttacaagtctaacaagattatttaccacaagaaccttactattttcaaggctccattctacgtgacttctaaggatgtgaacactgagtgcacttgcaagttcaagaacaacaactacaagattgtgcttaagccaaagtacgagaagaaagtgattcacggatgcaacttctcatctcaagtgtcatctaagcacactttcactgattctcttgatatttctcttgtggatgattctgctcacatttcttgcaacgtgcacctttctgagccaaagtacaaccaccttgtgggacttaattgcccaggtgatattattccagattgcttcttccaggtttaccaaccagagtctgaagaacttgagccatctaacattgtgtaccttgattctcagattaacattggagatattgagtactacgaggatgctgagggtgatgataagattaagttgttcggaattgtgggatctattccaaagactacttctttcacttgcatctgcaagaaggataagaaatctgcttacatgactgtgactattgattcagctaagcttgttgttaatactccatttgttgctgttttctctaactttgattcttctcaatgggaaaaggctgattgggctaacggttctgtttttaactgtgtttggaagccatctcaagttactttttctaacggaaagatgattcttactttggatagagagtatgtcgaccatcatcatcatcatcataaggatgaactttga

SEQ ID NO: 71 - protein, 664 aa, Artificial Sequence
  source: /note="Description of Artificial Sequence: Synthetic polypeptide"
MGFVLFSQLPSFLLVSTLLLFLVISHSCRAQNGGSYPYKSGEYRTKSFFGYGYYEVRMKAAKNVGIVSSFFTYTGPSDNNPWDEIDIEFLGKDTTKVQFNWYKNGVGGNEYLHNLGFDASQDFHTYGFEWRPDYIDFYVDGKKVYRGTRNIPVTPGKIMMNLWPGIGVDEWLGRYDGRTPLQAEYEYVKYYPNGRSNNDFCKPSSLNSEISGFIGYKCNFSNEGVHNLKPDMRERRSIFCTIHSYFIYDKIRLIIPKKSSSPEFKILPEKCFQKVYTDYENRVETDISELGLIEYEIEEQDTNPNYNERTITISPFSPKDIEFFCFCDNTEKVISSIEGRSAMVHVRVLKYPHNILFTQLTNDLFTYLPKTYQESNFVSNVLEVELNDGELFVLACELINKKCFQEGKEKALYKSNKIIYHKNLTIFKAPFYVTSKDVNTECTCKFKNNNYKIVLKPKYEKKVIHGCNFSSQVSSKHTFTDSLDISLVDDSAHISCNVHLSEPKYNHLVGLNCPGDIIPDCFFQVYQPESEELEPSNIVYLDSQINIGDIEYYEDAEGDDKIKLFGIVGSIPKTTSFTCICKKDKKSAYMTVTIDSAKLVVNTPFVAVFSNFDSSQWEKADWANGSVFNCVWKPSQVTFSNGKMILTLDREYVDHHHHHHKDEL

SEQ ID NO: 72 - DNA, 2007 bp, Artificial Sequence
  source: /note="Description of Artificial Sequence: Synthetic polynucleotide"
atgggatttgttctcttttcacaattgccttcatttcttcttgtctctacacttctcttattcctagtaatatcccactcttgccgtgcccaaaatggaggttcttatccatataagtctggtgagtatagaactaagtctttctttggatatggttattatgaagttaggatgaaggctgcaaagaacgttggaattgtttcttctttctttacttatactggaccatctgataacaacccatgggatgagattgatattgagtttcttggaaaggatactactaaggttcaattcaactggtataagaatggtgttggtggaaacgagtatcttcataaccttggatttgatgcttctcaagattttcatacttatggttttgagtggagaccagattatattgatttttatgttgatggaaagaaggtttatagaggtactagaaacattccagttactcctggaaagattatgatgaatctttggccaggaattggtgttgatgaatggcttggtagatatgatggaagaactccacttcaagctgagtatgagtatgttaagtattatccaaacggtagatctgaattcaagcttgttgttaatactccatttgttgctgttttctctaactttgattcttctcaatgggaaaaggctgattgggctaacggttctgtttttaactgtgtttggaagccatctcaagttactttttctaacggaaagatgattcttactttggatagagagtatgtcgacaacaacgatttctgcaagccatcttctcttaactctgagatttctggattcattggatacaagtgcaacttctctaacgagggtgttcacaaccttaagccagatatgagagagagaagatcaattttctgcactattcactcttacttcatttacgataagattaggcttattattccaaagaagtcatcttctccagagttcaagattcttccagagaagtgcttccagaaggtgtacactgattacgagaacagggtggagactgatatttctgagcttggacttattgagtacgagattgaagagcaagatacaaacccaaactacaacgagaggactattactatttctccattctctccaaaggatattgagttcttctgcttctgcgataacactgagaaagtgatttcttctattgagggaagatcagctatggttcatgtgagggtgttgaagtacccacacaacattcttttcactcaacttactaacgatcttttcacttacttgccaaagacttaccaagagtctaacttcgtgtctaacgtgcttgaggtggagcttaatgatggtgagttgttcgttcttgcttgcgagcttattaacaagaagtgtttccaagagggaaaagagaaggctctttacaagtctaacaagattatttaccacaagaaccttactattttcaaggctccattctacgtgacttctaaggatgtgaacactgagtgcacttgcaagttcaagaacaacaactacaagattgtgcttaagccaaagtacgagaagaaagtgattcacggatgcaacttctcatctcaagtgtcatctaagcacactttcactgattctcttgatatttctcttgtggatgattctgctcacatttcttgcaacgtgcacctttctgagccaaagtacaaccaccttgtgggacttaattgcccaggtgatattattccagattgcttcttccaggtttaccaaccagagtctgaagaacttgagccatctaacattgtgtaccttgattctcagattaacattggagatattgagtactacgaggatgctgagggtgatgataagattaagttgttcggaattgtgggatctattccaaagactacttctttcacttgcatctgcaagaaggataagaaatctgcttacatgactgtgactattgattcagctgtcgaccatcatcatcatcatcataaggatgaactttga

SEQ ID NO: 73 - protein, 668 aa, Artificial Sequence
  source: /note="Description of Artificial Sequence: Synthetic polypeptide"
MGFVLFSQLPSFLLVSTLLLFLVISHSCRAQNGGSYPYKSGEYRTKSFFGYGYYEVRMKAAKNVGIVSSFFTYTGPSDNNPWDEIDIEFLGKDTTKVQFNWYKNGVGGNEYLHNLGFDASQDFHTYGFEWRPDYIDFYVDGKKVYRGTRNIPVTPGKIMMNLWPGIGVDEWLGRYDGRTPLQAEYEYVKYYPNGRSEFKLVVNTPFVAVFSNFDSSQWEKADWANGSVFNCVWKPSQVTFSNGKMILTLDREYVDNNDFCKPSSLNSEISGFIGYKCNFSNEGVHNLKPDMRERRSIFCTIHSYFIYDKIRLIIPKKSSSPEFKILPEKCFQKVYTDYENRVETDISELGLIEYEIEEQDTNPNYNERTITISPFSPKDIEFFCFCDNTEKVISSIEGRSAMVHVRVLKYPHNILFTQLTNDLFTYLPKTYQESNFVSNVLEVELNDGELFVLACELINKKCFQEGKEKALYKSNKIIYHKNLTIFKAPFYVTSKDVNTECTCKFKNNNYKIVLKPKYEKKVIHGCNFSSQVSSKHTFTDSLDISLVDDSAHISCNVHLSEPKYNHLVGLNCPGDIIPDCFFQVYQPESEELEPSNIVYLDSQINIGDIEYYEDAEGDDKIKLFGIVGSIPKTTSFTCICKKDKKSAYMTVTIDSAVDHHHHHHKDEL

SEQ ID NO: 74 - DNA, 1392 bp, Artificial Sequence
  source: /note="Description of Artificial Sequence: Synthetic polynucleotide"
atgggatttgttctcttttcacaattgccttcatttcttcttgtctctacacttctcttattcctagtaatatcccactcttgccgtgcccaaaatggaggttcttatccatataagtctggtgagtatagaactaagtctttctttggatatggttattatgaagttaggatgaaggctgcaaagaacgttggaattgtttcttctttctttacttatactggaccatctgataacaacccatgggatgagattgatattgagtttcttggaaaggatactactaaggttcaattcaactggtataagaatggtgttggtggaaacgagtatcttcataaccttggatttgatgcttctcaagattttcatacttatggttttgagtggagaccagattatattgatttttatgttgatggaaagaaggtttatagaggtactagaaacattccagttactcctggaaagattatgatgaatctttggccaggaattggtgttgatgaatggcttggtagatatgatggaagaactccacttcaagctgagtatgagtatgttaagtattatccaaacggtagatctaacaacgatttctgcaagccatcttctcttaactctgagatttctggattcattggatacaagtgcaacttctctaacgagggtgttcacaaccttaagccagatatgagagagagaagatcaattttctgcactattcactcttacttcatttacgataagattaggcttattattccaaagaagtcatcttctccagagttcaagattcttccagagaagtgcttccagaaggtgtacactgattacgagaacagggtggagactgatatttctgagcttggacttattgagtacgagattgaagagaacgatacaaacccaaactacaacgagaggactattactatttctccattctctccaaaggatattgagttcttctgcttctgcgataacactgagaaagtgatttcttctattgagggaagatcagctatggttcatgtgagggtgttgaagtacccacacaacattcttttcactaaccttactaacgatcttttcacttacttgccaaagacttacaacgagtctaacttcgtgtctaacgtgcttgaggtggagcttaatgatggtgagttgttcgttcttgcttgcaagcttgttgttaatactccatttgttgctgttttctctaactttgattcttctcaatgggaaaaggctgattgggctaacggttctgtttttaactgtgtttggaagccatctcaagttactttttctaacggaaagatgattcttactttggatagagagtatgtcgaccatcatcatcatcatcataaggatgaactttga

SEQ ID NO: 75 - protein, 463 aa, Artificial Sequence
  source: /note="Description of Artificial Sequence: Synthetic polypeptide"
MGFVLFSQLPSFLLVSTLLLFLVISHSCRAQNGGSYPYKSGEYRTKSFFGYGYYEVRMKAAKNVGIVSSFFTYTGPSDNNPWDEIDIEFLGKDTTKVQFNWYKNGVGGNEYLHNLGFDASQDFHTYGFEWRPDYIDFYVDGKKVYRGTRNIPVTPGKIMMNLWPGIGVDEWLGRYDGRTPLQAEYEYVKYYPNGRSNNDFCKPSSLNSEISGFIGYKCNFSNEGVHNLKPDMRERRSIFCTIHSYFIYDKIRLIIPKKSSSPEFKILPEKCFQKVYTDYENRVETDISELGLIEYEIEENDTNPNYNERTITISPFSPKDIEFFCFCDNTEKVISSIEGRSAMVHVRVLKYPHNILFTNLTNDLFTYLPKTYNESNFVSNVLEVELNDGELFVLACKLVVNTPFVAVFSNFDSSQWEKADWANGSVFNCVWKPSQVTFSNGKMILTLDREYVDHHHHHHKDEL

SEQ ID NO: 76 - DNA, 1392 bp, Artificial Sequence
  source: /note="Description of Artificial Sequence: Synthetic polynucleotide"
atgggatttgttctcttttcacaattgccttcatttcttcttgtctctacacttctcttattcctagtaatatcccactcttgccgtgcccaaaatggaggttcttatccatataagtctggtgagtatagaactaagtctttctttggatatggttattatgaagttaggatgaaggctgcaaagaacgttggaattgtttcttctttctttacttatactggaccatctgataacaacccatgggatgagattgatattgagtttcttggaaaggatactactaaggttcaattcaactggtataagaatggtgttggtggaaacgagtatcttcataaccttggatttgatgcttctcaagattttcatacttatggttttgagtggagaccagattatattgatttttatgttgatggaaagaaggtttatagaggtactagaaacattccagttactcctggaaagattatgatgaatctttggccaggaattggtgttgatgaatggcttggtagatatgatggaagaactccacttcaagctgagtatgagtatgttaagtattatccaaacggtagatctaacaacgatttctgcaagccatcttctcttaactctgagatttctggattcattggatacaagtgcaacttctctaacgagggtgttcacaaccttaagccagatatgagagagagaagatcaattttctgcactattcactcttacttcatttacgataagattaggcttattattccaaagaagtcatcttctccagagttcaagattcttccagagaagtgcttccagaaggtgtacactgattacgagaacagggtggagactgatatttctgagcttggacttattgagtacgagattgaagagcaagatacaaacccaaactacaacgagaggactattactatttctccattctctccaaaggatattgagttcttctgcttctgcgataacactgagaaagtgatttcttctattgagggaagatcagctatggttcatgtgagggtgttgaagtacccacacaacattcttttcactaaccttactaacgatcttttcacttacttgccaaagacttacaacgagtctaacttcgtgtctaacgtgcttgaggtggagcttaatgatggtgagttgttcgtgcttgcttgcaagcttgttgttaatactccatttgttgctgttttctctaactttgattcttctcaatgggaaaaggctgattgggctaacggttctgtttttaactgtgtttggaagccatctcaagttactttttctaacggaaagatgattcttactttggatagagagtatgtcgaccatcatcatcatcatcataaggatgaactttga

SEQ ID NO: 77 - protein, 463 aa, Artificial Sequence
  source: /note="Description of Artificial Sequence: Synthetic polypeptide"
MGFVLFSQLPSFLLVSTLLLFLVISHSCRAQNGGSYPYKSGEYRTKSFFGYGYYEVRMKAAKNVGIVSSFFTYTGPSDNNPWDEIDIEFLGKDTTKVQFNWYKNGVGGNEYLHNLGFDASQDFHTYGFEWRPDYIDFYVDGKKVYRGTRNIPVTPGKIMMNLWPGIGVDEWLGRYDGRTPLQAEYEYVKYYPNGRSNNDFCKPSSLNSEISGFIGYKCNFSNEGVHNLKPDMRERRSIFCTIHSYFIYDKIRLIIPKKSSSPEFKILPEKCFQKVYTDYENRVETDISELGLIEYEIEEQDTNPNYNERTITISPFSPKDIEFFCFCDNTEKVISSIEGRSAMVHVRVLKYPHNILFTNLTNDLFTYLPKTYNESNFVSNVLEVELNDGELFVLACKLVVNTPFVAVFSNFDSSQWEKADWANGSVFNCVWKPSQVTFSNGKMILTLDREYVDHHHHHHKDEL

SEQ ID NO: 78 - DNA, 1423 bp, Artificial Sequence
  source: /note="Description of Artificial Sequence: Synthetic polynucleotide"
atgggatttgttctcttttcacaattgccttcatttcttcttgtctctacacttctcttattcctagtaatatcccactcttgccgtgcccaaaatggaggttcttatccatataagtctggtgagtatagaactaagtctttctttggatatggttattatgaagttaggatgaaggctgcaaagaacgttggaattgtttcttctttctttacttatactggaccatctgataacaacccatgggatgagattgatattgagtttcttggaaaggatactactaaggttcaattcaactggtataagaatggtgttggtggaaacgagtatcttcataaccttggatttgatgcttctcaagattttcatacttatggttttgagtggagaccagattatattgatttttatgttgatggaaagaaggtttatagaggtactagaaacattccagttactcctggaaagattatgatgaatctttggccaggaattggtgttgatgaatggcttggtagatatgatggaagaactccacttcaagctgagtatgagtatgttaagtattatccaaacggtagatctgaattcaagcttgttgttaatactccatttgttgctgttttctctaactttgattcttctcaatgggaaaaggctgattgggctaacggttctgtttttaactgtgtttggaagccatctcaagttactttttctaacggaaagatgattcttactttggatagagagtatgtcgacaacaacgatttctgcaagccatcttctcttaactctgagatttctggattcattggatacaagtgcaacttctctaacgagggtgttcacaaccttaagccagatatgagagagagaagatcaattttctgcactattcactcttacttcatttacgataagattaggcttattattccaaagaagtcatcttctccagagttcaagattcttccagagaagtgcttccagaaggtgtacactgattacgagaacagggtggagactgatatttctgagcttggacttattgagtacgagattgaagagcaagatacaaacccaaactacaacgagaggactattactatttctccattctctccaaaggatattgagttcttctgcttctgcgataacactgagaaagtgatttcttctattgagggaagatcagctatggttcatgtgagggtgttgaagtacccacacaacattcttttcactaaccttactaacgatcttttcacttacttgccaaagacttacaacgagtctaacttcgtgtctaacgtgcttgaggtggagcttaatgatggtgagttgttcgtgcttgcttgcgtcgaccatcatcatcatcatcataaggatgaactttgagttgttcgtgcttgcttgc

SEQ ID NO: 79 - protein, 467 aa, Artificial Sequence
  source: /note="Description of Artificial Sequence: Synthetic polypeptide"
MGFVLFSQLPSFLLVSTLLLFLVISHSCRAQNGGSYPYKSGEYRTKSFFGYGYYEVRMKAAKNVGIVSSFFTYTGPSDNNPWDEIDIEFLGKDTTKVQFNWYKNGVGGNEYLHNLGFDASQDFHTYGFEWRPDYIDFYVDGKKVYRGTRNIPVTPGKIMMNLWPGIGVDEWLGRYDGRTPLQAEYEYVKYYPNGRSEFKLVVNTPFVAVFSNFDSSQWEKADWANGSVFNCVWKPSQVTFSNGKMILTLDREYVDNNDFCKPSSLNSEISGFIGYKCNFSNEGVHNLKPDMRERRSIFCTIHSYFIYDKIRLIIPKKSSSPEFKILPEKCFQKVYTDYENRVETDISELGLIEYEIEEQDTNPNYNERTITISPFSPKDIEFFCFCDNTEKVISSIEGRSAMVHVRVLKYPHNILFTNLTNDLFTYLPKTYNESNFVSNVLEVELNDGELFVLACVDHHHHHHKDEL

SEQ ID NO: 80 - DNA, 1398 bp, Artificial Sequence
  source: /note="Description of Artificial Sequence: Synthetic polynucleotide"
atgggatttgttctcttttcacaattgccttcatttcttcttgtctctacacttctcttattcctagtaatatcccactcttgccgtgcccaaaatggaggttcttatccatataagtctggtgagtatagaactaagtctttctttggatatggttattatgaagttaggatgaaggctgcaaagaacgttggaattgtttcttctttctttacttatactggaccatctgataacaacccatgggatgagattgatattgagtttcttggaaaggatactactaaggttcaattcaactggtataagaatggtgttggtggaaacgagtatcttcataaccttggatttgatgcttctcaagattttcatacttatggttttgagtggagaccagattatattgatttttatgttgatggaaagaaggtttatagaggtactagaaacattccagttactcctggaaagattatgatgaatctttggccaggaattggtgttgatgaatggcttggtagatatgatggaagaactccacttcaagctgagtatgagtatgttaagtattatccaaacggtagatcttgcgagcttattaacaagaagtgcttccaagagggaaaagagaaggctctttacaagtctaacaagattatttaccacaagaaccttactattttcaaggctccattctacgtgacttctaaggatgtgaacactgagtgcacttgcaagttcaagaacaacaactacaagattgtgcttaagccaaagtacgagaagaaagtgattcacggatgcaacttctcttctaacgtgtcatctaagcacactttcactgattctcttgatatttctcttgtggatgattctgctcacatttcttgcaacgtgcacctttctgagccaaagtacaaccaccttgtgggacttaattgcccaggtgatattattccagattgcttcttccaggtttaccaaccagagtctgaagaacttgagccatctaacattgtgtaccttgattctcagattaacattggagatattgagtactacgaggatgctgagggtgatgataagattaagttgttcggaattgtgggatctattccaaagactacttctttcacttgcatctgcaagaaggataagaaatctgcttacatgactgtgactattgattctgctaagcttgttgttaatactccatttgttgctgttttctctaactttgattcttctcaatgggaaaaggctgattgggctaacggttctgtttttaactgtgtttggaagccatctcaagttactttttctaacggaaagatgattcttactttggatagagagtatgtcgaccatcatcatcatcatcataaggatgaactttga

SEQ ID NO: 81 - protein, 465 aa, Artificial Sequence
  source: /note="Description of Artificial Sequence: Synthetic polypeptide"
MGFVLFSQLPSFLLVSTLLLFLVISHSCRAQNGGSYPYKSGEYRTKSFFGYGYYEVRMKAAKNVGIVSSFFTYTGPSDNNPWDEIDIEFLGKDTTKVQFNWYKNGVGGNEYLHNLGFDASQDFHTYGFEWRPDYIDFYVDGKKVYRGTRNIPVTPGKIMMNLWPGIGVDEWLGRYDGRTPLQAEYEYVKYYPNGRSCELINKKCFQEGKEKALYKSNKIIYHKNLTIFKAPFYVTSKDVNTECTCKFKNNNYKIVLKPKYEKKVIHGCNFSSNVSSKHTFTDSLDISLVDDSAHISCNVHLSEPKYNHLVGLNCPGDIIPDCFFQVYQPESEELEPSNIVYLDSQINIGDIEYYEDAEGDDKIKLFGIVGSIPKTTSFTCICKKDKKSAYMTVTIDSAKLVVNTPFVAVFSNFDSSQWEKADWANGSVFNCVWKPSQVTFSNGKMILTLDREYVDHHHHHHKDEL

SEQ ID NO: 82 - DNA, 1083 bp, Artificial Sequence
  source: /note="Description of Artificial Sequence: Synthetic polynucleotide"
atgggatttgttctcttttcacaattgccttcatttcttcttgtctctacacttctcttattcctagtaatatcccactcttgccgtgcccaaaatggaggttcttatccatataagtctggtgagtatagaactaagtctttctttggatatggttattatgaagttaggatgaaggctgcaaagaacgttggaattgtttcttctttctttacttatactggaccatctgataacaacccatgggatgagattgatattgagtttcttggaaaggatactactaaggttcaattcaactggtataagaatggtgttggtggaaacgagtatcttcataaccttggatttgatgcttctcaagattttcatacttatggttttgagtggagaccagattatattgatttttatgttgatggaaagaaggtttatagaggtactagaaacattccagttactcctggaaagattatgatgaatctttggccaggaattggtgttgatgaatggcttggtagatatgatggaagaactccacttcaagctgagtatgagtatgttaagtattatccaaacggtagatcttgcgagcttattaacaagaagtgtttccaagagggaaaagagaaggctctttacaagtctaacaagattatttaccacaagaaccttactattttcaaggctccattctacgtgacttctaaggatgtgaacactgagtgcacttgcaagttcaagaacaacaactacaagattgtgcttaagccaaagtacgagaagaaagtgattcacggatgcaacttctcatctcaagtgtcatctaagcacactttcactgattctcttgatatttctcttgtggatgattctgctaagcttgttgttaatactccatttgttgctgttttctctaactttgattcttctcaatgggaaaaggctgattgggctaacggttctgtttttaactgtgtttggaagccatctcaagttactttttctaacggaaagatgattcttactttggatagagagtatgtcgaccatcatcatcatcatcataaggatgaactttga

SEQ ID NO: 83 - protein, 465 aa, Artificial Sequence
  source: /note="Description of Artificial Sequence: Synthetic polypeptide"
MGFVLFSQLPSFLLVSTLLLFLVISHSCRAQNGGSYPYKSGEYRTKSFFGYGYYEVRMKAAKNVGIVSSFFTYTGPSDNNPWDEIDIEFLGKDTTKVQFNWYKNGVGGNEYLHNLGFDASQDFHTYGFEWRPDYIDFYVDGKKVYRGTRNIPVTPGKIMMNLWPGIGVDEWLGRYDGRTPLQAEYEYVKYYPNGRSCELINKKCFQEGKEKALYKSNKIIYHKNLTIFKAPFYVTSKDVNTECTCKFKNNNYKIVLKPKYEKKVIHGCNFSSQVSSKHTFTDSLDISLVDDSAHISCNVHLSEPKYNHLVGLNCPGDIIPDCFFQVYQPESEELEPSNIVYLDSQINIGDIEYYEDAEGDDKIKLFGIVGSIPKTTSFTCICKKDKKSAYMTVTIDSAKLVVNTPFVAVFSNFDSSQWEKADWANGSVFNCVWKPSQVTFSNGKMILTLDREYVDHHHHHHKDEL

SEQ ID NO: 84 - DNA, 1410 bp, Artificial Sequence
  source: /note="Description of Artificial Sequence: Synthetic polynucleotide"
atgggatttgttctcttttcacaattgccttcatttcttcttgtctctacacttctcttattcctagtaatatcccactcttgccgtgcccaaaatggaggttcttatccatataagtctggtgagtatagaactaagtctttctttggatatggttattatgaagttaggatgaaggctgcaaagaacgttggaattgtttcttctttctttacttatactggaccatctgataacaacccatgggatgagattgatattgagtttcttggaaaggatactactaaggttcaattcaactggtataagaatggtgttggtggaaacgagtatcttcataaccttggatttgatgcttctcaagattttcatacttatggttttgagtggagaccagattatattgatttttatgttgatggaaagaaggtttatagaggtactagaaacattccagttactcctggaaagattatgatgaatctttggccaggaattggtgttgatgaatggcttggtagatatgatggaagaactccacttcaagctgagtatgagtatgttaagtattatccaaacggtagatctgaattcaagcttgttgttaatactccatttgttgctgttttctctaactttgattcttctcaatgggaaaaggctgattgggctaacggttctgtttttaactgtgtttggaagccatctcaagttactttttctaacggaaagatgattcttactttggatagagagtatgtcgactgcgagcttattaacaagaagtgcttccaagagggaaaagagaaggctctttacaagtctaacaagattatttaccacaagaaccttactattttcaaggctccattctacgtgacttctaaggatgtgaacactgagtgcacttgcaagttcaagaacaacaactacaagattgtgcttaagccaaagtacgagaagaaagtgattcacggatgcaacttctcttctaacgtgtcatctaagcacactttcactgattctcttgatatttctcttgtggatgattctgctcacatttcttgcaacgtgcacctttctgagccaaagtacaaccaccttgtgggacttaattgcccaggtgatattattccagattgcttcttccaggtttaccaaccagagtctgaagaacttgagccatctaacattgtgtaccttgattctcagattaacattggagatattgagtactacgaggatgctgagggtgatgataagattaagttgttcggaattgtgggatctattccaaagactacttctttcacttgcatctgcaagaaggataagaaatctgcttacatgactgtgactattgattctgctgtcgaccatcatcatcatcatcataaggatgaactttga

SEQ ID NO: 85 - protein, 469 aa, Artificial Sequence
  source: /note="Description of Artificial Sequence: Synthetic polypeptide"
MGFVLFSQLPSFLLVSTLLLFLVISHSCRAQNGGSYPYKSGEYRTKSFFGYGYYEVRMKAAKNVGIVSSFFTYTGPSDNNPWDEIDIEFLGKDTTKVQFNWYKNGVGGNEYLHNLGFDASQDFHTYGFEWRPDYIDFYVDGKKVYRGTRNIPVTPGKIMMNLWPGIGVDEWLGRYDGRTPLQAEYEYVKYYPNGRSEFKLVVNTPFVAVFSNFDSSQWEKADWANGSVFNCVWKPSQVTFSNGKMILTLDREYVDCELINKKCFQEGKEKALYKSNKIIYHKNLTIFKAPFYVTSKDVNTECTCKFKNNNYKIVLKPKYEKKVIHGCNFSSNVSSKHTFTDSLDISLVDDSAHISCNVHLSEPKYNHLVGLNCPGDIIPDCFFQVYQPESEELEPSNIVYLDSQINIGDIEYYEDAEGDDKIKLFGIVGSIPKTTSFTCICKKDKKSAYMTVTIDSAVDHHHHHHKDEL

SEQ ID NO: 86 - DNA, 567 bp, Artificial Sequence
  source: /note="Description of Artificial Sequence: Synthetic polynucleotide"
atgggatttgttctcttttcacaattgccttcatttcttcttgtctctacacttctcttattcctagtaatatcccactcttgccgtgccaacaacgatttctgcaagccatcttctcttaactctgagatttctggattcattggatacaagtgcaacttctctaacgagggtgttcacaaccttaagccagatatgagagagagaagatcaattttctgcactattcactcttacttcatttacgataagattaggcttattattccaaagaagtcatcttctccagagttcaagattcttccagagaagtgcttccagaaggtgtacactgattacgagaacagggtggagactgatatttctgagcttggacttattgagtacgagattgaagagaacgatacaaacccaaactacaacgagaggactattactatttctccattctctccaaaggatattgagttcttctgcttctgcgataacactgagaaagtgatttcttctattgagggaagatcagctgtcgaccatcatcatcatcatcataaggatgaactttga

SEQ ID NO: 87 - protein, 188 aa, Artificial Sequence
  source: /note="Description of Artificial Sequence: Synthetic polypeptide"
MGFVLFSQLPSFLLVSTLLLFLVISHSCRANNDFCKPSSLNSEISGFIGYKCNFSNEGVHNLKPDMRERRSIFCTIHSYFIYDKIRLIIPKKSSSPEFKILPEKCFQKVYTDYENRVETDISELGLIEYEIEENDTNPNYNERTITISPFSPKDIEFFCFCDNTEKVISSIEGRSAVDHHHHHHKDEL

SEQ ID NO: 88 - DNA, 1231 bp, Artificial Sequence
  source: /note="Description of Artificial Sequence: Synthetic polynucleotide"
atgggatttgttctcttttcacaattgccttcatttcttcttgtctctacacttctcttattcctagtaatatcccactcttgccgtgcccaaaatggaggttcttatccatataagtctggtgagtatagaactaagtctttctttggatatggttattatgaagttaggatgaaggctgcaaagaacgttggaattgtttcttctttctttacttatactggaccatctgataacaacccatgggatgagattgatattgagtttcttggaaaggatactactaaggttcaattcaactggtataagaatggtgttggtggaaacgagtatcttcataaccttggatttgatgcttctcaagattttcatacttatggttttgagtggagaccagattatattgatttttatgttgatggaaagaaggtttatagaggtactagaaacattccagttactcctggaaagattatgatgaatctttggccaggaattggtgttgatgaatggcttggtagatatgatggaagaactccacttcaagctgagtatgagtatgttaagtattatccaaacggtagatctaacaacgatttctgcaagccatcttctcttaactctgagatttctggattcattggatacaagtgcaacttctctaacgagggtgttcacaaccttaagccagatatgagagagagaagatcaattttctgcactattcactcttacttcatttacgataagattaggcttattattccaaagaagtcatcttctccagagttcaagattcttccagagaagtgcttccagaaggtgtacactgattacgagaacagggtggagactgatatttctgagcttggacttattgagtacgagattgaagagaaacgatacaaacccaaactacaacgagaggactattactatttctccattctctccaaaggatattgagttcttctgcttctgcgataacactgagaaagtgatttcttctattgagggaagatcagctaagcttgttgttaatactccatttgttgctgttttctctaactttgattcttctcaatgggaaaaggctgattgggctaacggttctgtttttaactgtgtttggaagccatctcaagttactttttctaacggaaagatgattcttactttggatagagagtatgtcgaccatcatcatcatcatcataaggatgaactttga

SEQ ID NO: 89 - protein, 409 aa, Artificial Sequence
  source: /note="Description of Artificial Sequence: Synthetic polypeptide"
MGFVLFSQLPSFLLVSTLLLFLVISHSCRAQNGGSYPYKSGEYRTKSFFGYGYYEVRMKAAKNVGIVSSFFTYTGPSDNNPWDEIDIEFLGKDTTKVQFNWYKNGVGGNEYLHNLGFDASQDFHTYGFEWRPDYIDFYVDGKKVYRGTRNIPVTPGKIMMNLWPGIGVDEWLGRYDGRTPLQAEYEYVKYYPNGRSNNDFCKPSSLNSEISGFIGYKCNFSNEGVHNLKPDMRERRSIFCTIHSYFIYDKIRLIIPKKSSSPEFKILPEKCFQKVYTDYENRVETDISELGLIEYEIEENDTNPNYNERTITISPFSPKDIEFFCFCDNTEKVISSIEGRSAKLVVNTPFVAVFSNFDSSQWEKADWANGSVFNCVWKPSQVTFSNGKMILTLDREYVDHHHHHHKDEL

SEQ ID NO: 90 - DNA, 888 bp, Artificial Sequence
  source: /note="Description of Artificial Sequence: Synthetic polynucleotide"
atgggatttgttctcttttcacaattgccttcatttcttcttgtctctacacttctcttattcctagtaatatcccactcttgccgtgccatggttcatgtgagggtgttgaagtacccacacaacattcttttcactaaccttactaacgatcttttcacttacttgccaaagacttacaacgagtctaacttcgtgtctaacgtgcttgaggtggagcttaatgatggtgagttgttcgttcttgcttgcgagcttattaacaagaagtgtttccaagagggaaaagagaaggctctttacaagtctaacaagattatttaccacaagaaccttactattttcaaggctccattctacgtgacttctaaggatgtgaacactgagtgcacttgcaagttcaagaacaacaactacaagattgtgcttaagccaaagtacgagaagaaagtgattcacggatgcaacttctcatctaacgtgtcatctaagcacactttcactgattctcttgatatttctcttgtggatgattctgctcacatttcttgcaacgtgcacctttctgagccaaagtacaaccaccttgtgggacttaattgcccaggtgatattattccagattgcttcttccaggtttaccaaccagagtctgaagaacttgagccatctaacattgtgtaccttgattctcagattaacattggagatattgagtactacgaggatgctgagggtgatgataagattaagttgttcggaattgtgggatctattccaaagactacttctttcacttgcatctgcaagaaggataagaaatctgcttacatgactgtgactattgattcagctcatcaccatcaccaccacaaggatgagctttga

SEQ ID NO: 91 - protein, 295 aa, Artificial Sequence
  source: /note="Description of Artificial Sequence: Synthetic polypeptide"
MGFVLFSQLPSFLLVSTLLLFLVISHSCRAMVHVRVLKYPHNILFTNLTNDLFTYLPKTYNESNFVSNVLEVELNDGELFVLACELINKKCFQEGKEKALYKSNKIIYHKNLTIFKAPFYVTSKDVNTECTCKFKNNNYKIVLKPKYEKKVIHGCNFSSNVSSKHTFTDSLDISLVDDSAHISCNVHLSEPKYNHLVGLNCPGDIIPDCFFQVYQPESEELEPSNIVYLDSQINIGDIEYYEDAEGDDKIKLFGIVGSIPKTTSFTCICKKDKKSAYMTVTIDSAHHHHHHKDEL

SEQ ID NO: 92 - DNA, 1557 bp, Artificial Sequence
  source: /note="Description of Artificial Sequence: Synthetic polynucleotide"
atgggatttgttctcttttcacaattgccttcatttcttcttgtctctacacttctcttattcctagtaatatcccactcttgccgtgcccaaaatggaggttcttatccatataagtctggtgagtatagaactaagtctttctttggatatggttattatgaagttaggatgaaggctgcaaagaacgttggaattgtttcttctttctttacttatactggaccatctgataacaacccatgggatgagattgatattgagtttcttggaaaggatactactaaggttcaattcaactggtataagaatggtgttggtggaaacgagtatcttcataaccttggatttgatgcttctcaagattttcatacttatggttttgagtggagaccagattatattgatttttatgttgatggaaagaaggtttatagaggtactagaaacattccagttactcctggaaagattatgatgaatctttggccaggaattggtgttgatgaatggcttggtagatatgatggaagaactccacttcaagctgagtatgagtatgttaagtattatccaaacggtagatctatggttcatgtgagggtgttgaagtacccacacaacattcttttcactaaccttactaacgatcttttcacttacttgccaaagacttacaacgagtctaacttcgtgtctaacgtgcttgaggtggagcttaatgatggtgagttgttcgttcttgcttgcgagcttattaacaagaagtgtttccaagagggaaaagagaaggctctttacaagtctaacaagattatttaccacaagaaccttactattttcaaggctccattctacgtgacttctaaggatgtgaacactgagtgcacttgcaagttcaagaacaacaactacaagattgtgcttaagccaaagtacgagaagaaagtgattcacggatgcaacttctcatctaacgtgtcatctaagcacactttcactgattctcttgatatttctcttgtggatgattctgctcacatttcttgcaacgtgcacctttctgagccaaagtacaaccaccttgtgggacttaattgcccaggtgatattattccagattgcttcttccaggtttaccaaccagagtctgaagaacttgagccatctaacattgtgtaccttgattctcagattaacattggagatattgagtactacgaggatgctgagggtgatgataagattaagttgttcggaattgtgggatctattccaaagactacttctttcacttgcatctgcaagaaggataagaaatctgcttacatgactgtgactattgattcagctaagcttgttgttaatactccatttgttgctgttttctctaactttgattcttctcaatgggaaaaggctgattgggctaacggttctgtttttaactgtgtttggaagccatctcaagttactttttctaacggaaagatgattcttactttggatagagagtatgtcgaccatcatcatcatcatcataaggatgaactttga

SEQ ID NO: 93 - protein, 518 aa, Artificial Sequence
  source: /note="Description of Artificial Sequence: Synthetic polypeptide"
MGFVLFSQLPSFLLVSTLLLFLVISHSCRAQNGGSYPYKSGEYRTKSFFGYGYYEVRMKAAKNVGIVSSFFTYTGPSDNNPWDEIDIEFLGKDTTKVQFNWYKNGVGGNEYLHNLGFDASQDFHTYGFEWRPDYIDFYVDGKKVYRGTRNIPVTPGKIMMNLWPGIGVDEWLGRYDGRTPLQAEYEYVKYYPNGRSMVHVRVLKYPHNILFTNLTNDLFTYLPKTYNESNFVSNVLEVELNDGELFVLACELINKKCFQEGKEKALYKSNKIIYHKNLTIFKAPFYVTSKDVNTECTCKFKNNNYKIVLKPKYEKKVIHGCNFSSNVSSKHTFTDSLDISLVDDSAHISCNVHLSEPKYNHLVGLNCPGDIIPDCFFQVYQPESEELEPSNIVYLDSQINIGDIEYYEDAEGDDKIKLFGIVGSIPKTTSFTCICKKDKKSAYMTVTIDSAKLVVNTPFVAVFSNFDSSQWEKADWANGSVFNCVWKPSQVTFSNGKMILTLDREYVDHHHHHHKDEL

SEQ ID NO: 94 - DNA, 1683 bp, Artificial Sequence
  source: /note="Description of Artificial Sequence: Synthetic polynucleotide"
ggaggttcttatccatataagtctggtgagtatagaactaagtctttctttggatatggttattatgaagttaggatgaaggctgcaaagaacgttggaattgtttcttctttctttacttatactggaccatctgataacaacccatgggatgagattgatattgagtttcttggaaaggatactactaaggttcaattcaactggtataagaatggtgttggtggaaacgagtatcttcataaccttggatttgatgcttctcaagattttcatacttatggttttgagtggagaccagattatattgatttttatgttgatggaaagaaggtttatagaggtactagaaacattccagttactcctggaaagattatgatgaatctttggccaggaattggtgttgatgaatggcttggtagatatgatggaagaactccacttcaagctgagtatgagtatgttaagtattatccaaacggtagatctaacaacactaacaaagagtatgtttgcgatttcactgatcagcttaagccaactgagtctggaccaaaggttaagaagtgcgaggttaaggttaacgagccacttattaaggtgaagattatttgcccacttaagggatctgtggagaagttgtacgataacattgagtacgtgccaaagaagtctccatacgttgttcttacaaaagaagagactaagttgaaagagaagttgctttctaagttgatttacggacttcttatttctccaactgtgaacgagaaagagaacaacttcaaagagggtgttattgagttcactcttccaccagttgttcacaaggctactgtgttctacttcatttgcgataactctaagactgaggatgataacaagaagggaaacaggggtattgtggaggtttacgtggagccatacggaaacaagattaacggatgcgctttccttgatgaggatgaagaggaagagaagtacggaaaccagattgaagaggatgagcacaacgagaagattaagatgaaaactttcttcactcagaacatttacaagaagaacaacatttacccatgctacatgaagttgtactctggtgatattggaggaattcttttcccaaagaacattaagtctactacttgcttcgaagagatgattccatacaacaaagagattaagtggaacaaagagaacaagtctcttggaaacttggtgaacaactctgtggtgtataacaaagagatgaacgctaagtacttcaacgttcagtacgtgcacattccaacttcatacaaggatactcttaaccttttttgttctattattcttaaagaggaagagtctaaccttatttctacttcttaccttgtgtacgtttctattaacgaagagcttcaattctctcttttcgatttctacgagtctttcgtgcctattaagaaaactattcaggtggcacagaagaacgttaagcttgttgttaatactccatttgttgctgttttctctaactttgattcttctcaatgggaaaaggctgattgggctaacggttctgtttttaactgtgtttggaagccatctcaagttactttttctaacggaaagatgattcttactttggatagagagtatgtcgaccatcatcatcatcatcataaggatgaactttga

SEQ ID NO: 95 - protein, 3135 aa, Plasmodium falciparum
MKKIITLKNLFLIILVYIFSEKKDLRCNVIKGNNIKDDEDKRFHLFYYSHNLFKTPETKEKKNKKECFYKNGGIYNLSKEIRMRKDTSVKIKQRTCPFHKEGSSFEMGSKNITCFYPIVGKKERKTLDTIIIKKNVTNDHVVSSDMHSNVQEKNMILIRNIDKENKNDIQNVEEKIQRDTYENKDYESDDTLIEWFDDNTNEENFLLTFLKRCLMKIFSSPKRKKTVVQKKHKSNFFINSSLKYIYMYLTPSDSFNLVRRNRNLDEEDMSPRDNFVIDDEEEEEEEEEEEEEEEEEEEEEEEEEYDDYVYEESGDETEEQLQEEHQEEVGAESSEESFNDEDEDSVEARDGDMIRVDEYYEDQDGDTYDSTIKNEDVDEEVGEEVGEEVGEEVGEEVGEEVGEEVGEEVGEEVGEEEGEEVGEGVGEEVGEEEGEEVGEEEGEYVDEKERQGEIYPFGDEEEKDEGGESFTYEKSEVDKTDLFKFIEGGEGDDVYKVDGSKVLLDDDTISRVSKKHTARDGEYGEYGEAVEDGENVIKIIRSVLQSGALPSVGVDELDKIDLSYETTESGDTAVSEDSYDKYASNNTNKEYVCDFTDQLKPTESGPKVKKCEVKVNEPLIKVKIICPLKGSVEKLYDNIEYVPKKSPYVVLTKEETKLKEKLLSKLIYGLLISPTVNEKENNFKEGVIEFTLPPVVHKATVFYFICDNSKTEDDNKKGNRGIVEVYVEPYGNKINGCAFLDEDEEEEKYGNQIEEDEHNEKIKMKTFFTQNIYKKNNIYPCYMKLYSGDIGGILFPKNIKSTTCFEEMIPYNKEIKWNKENKSLGNLVNNSVVYNKEMNAKYFNVQYVHIPTSYKDTLNLFCSIILKEEESNLISTSYLVYVSINEELNFSLFDFYESFVPIKKTIQVAQKNVNNKEHDYTCDFTDKLDKTVPSTANGKKLFICRKHLKEFDTFTLKCNVNKTQYPNIEIFPKTLKDKKEVLKLDLDIQYQMFSKFFKFNTQNAKYLNLYPYYLIFPFNHIGKKELKNNPTYKNHKDVKYFEQSSVLSPLSSADSLGKLLNFLDTQETVCLTEKIRYLNLSINELGSDNNTFSVTFQVPPYIDIKEPFYFMFGCNNNKGEGNIGIVELLISKQEEKIKGCNFHESKLDYFNENISSDTHECTLHAYENDIIGFNCLETTHPNEVEVEVEDAEIYLQPENCFNNVYKGLNSVDITTILKNAQTYNINNKKTPTFLKIPPYNLLEDVEISCQCTIKQVVKKIKVIITKNDTVLLKREVQSESTLDDKIYKCEHENFINPRVNKTFDENVEYTCNIKIENFFNYIQIFCPAKDLGIYKNIQMYYDIVKPTRVPQFKKFNNEELHKLIPNSEMLHKTKEMLILYNEEKVDLLHFYVFLPIYIKDIYEFNIVCDNSKTMWKNQLGGKVIYHITVSKREQKVKGCSFDNEHAHMFSYNKTNVKNCIIDAKPKDLIGFVCPSGTLKLTNCFKDAIVHTNLTNINGILYLKNNLANFTYKHQFNYMEIPALMDNDISFKCICVDLKKKKYNVKSPLGPKVLRALYKKLNIKFDNYVTGTDQNKYLMTYMDLHLSHKRNYLKELFHDLGKKKPADTDANPESIIESLSINESNESGPFPTGDVDAEHLILEGYDTWESLYDEQLEEVIYNDIESLELKDIEQYVLQVNLKAPKLMMSAQIHNNRHVCDFSKNNLIVPESLKKKEELGGNPVNIHCYALLKPLDTLYVKCPTSKDNYEAAKVNISENDNEYELQVISLIEKRFHNFETLESKKPGNGDVVVHNGVVDTGPVLDNSTFEKYFKNIKIKPDKFFEKVINEYDDTEEEKDLESILPGAIVSPMKVLKKKDPFTSYAAFVVPPIVPKDLHFKVECNNTEYKDENQYISGYNGIIHIDISNSNRKINGCDFSTNNSSILTSSVKLVNGETKNCEININNNEVFGIICDNETNLDPEKCFHEIYSKDNKTVKKFREVIPNIDIFSLHNSNKKKVAYAKVPLDYINKLLFSCSCKTSHTNTIGTMKVTLNKDEKEEEDFKTAQGIKHNNVHLCNFFDNPELTFDNNKIVLCKIDAELFSEVIIQLPIFGTKNVEEGVQNEEYKKFSLKPSLVFDDNNNDIKVIGKEKNEVSISLALKGVYGNRIFTFDKNGKKGEGISFFIPPIKQDTDLKFIINETIDNSNIKQRGLIYIFVRKNVSENSFKLCDFTTGSTSLMELNSQVKEKKCTVKIKKGDIFGLKCPKGFAIFPQACFSNVLLEYYKSDYEDSEHINYYIHKDKKYNLKPKDVIELMDENFRELQNIQQYTGISNITDVLHFKNFNLGNLPLNFKNHYSTAYAKVPDTFNSIINFSCNCYNPEKHVYGTMQVESDNRNFDNIKKNENVIKNFLLPNIEKYALLLDDEERQKKIKQQQEEEQQEQILKDQDDRLSRHDDYNKNHTYILYDSNEHICDYEKNESLISTLPNDTKKIQKSICKINAKALDVVTIKCPHTKNFTPKDYFPNSSLITNDKKIVITFDKKNFVTYIDPTKKTFSLKDIYIQSFYGVSLDHLNQIKKIHEEWDDVHLFYPPHNVLHNVVLNNHIVNLSSALEGVLFMKSKVTGDETATKKNTTLPTDGVSSILIPPYVKEDITFHLFCGKSTTKKPNKKNTSLALIHIHISSNRNIIHGCDFLYLENQTNDAISNNNNNSYSIFTHNKNTENNLICDISLIPKTVIGIKCPNKKLNPQTCFDEVYYVKQEDVPSKTITADKYNTFSKDKIGNILKNAISINNPDEKDNTYTYLILPEKFEEELIDTKKVLACTCDNKYIIHMKIEKSTMDKIKIDEKKTIGKDICKYDVTTKVATCEIIDTIDSSVLKEHHTVHYSITLSRWDKLIIKYPTNEKTHFENFFVNPFNLKDKVLYNYNKPINIEHILPGAITTDIYDTRTKIKQYILRIPPYVHKDIHFSLEFNNSLSLTKQNQNIIYGNVAKIFIHINQGYKEIHGCDFTGKYSHLFTYSKKPLPNDDDICNVTIGNNTFSGFACLSHFELKPNNCFSSVYDYNEANKVKKLFDLSTKVELDHIKQNTSGYTLSYIIFNKESTKLKFSCTCSSNYSNYTIRITFDPNYIIPEPQSRAIIKYVDLQDKNFAKYLRKL

SEQ ID NO: 96 - protein, 592 aa, Artificial Sequence
  source: /note="Description of Artificial Sequence: Synthetic polypeptide"
MGFVLFSQLPSFLLVSTLLLFLVISHSCRAQNGGSYPYKSGEYRTKSFFGYGYYEVRMKAAKNVGIVSSFFTYTGPSDNNPWDEIDIEFLGKDTTKVQFNWYKNGVGGNEYLHNLGFDASQDFHTYGFEWRPDYIDFYVDGKKVYRGTRNIPVTPGKIMMNLWPGIGVDEWLGRYDGRTPLQAEYEYVKYYPNGRSNNTNKEYVCDFTDQLKPTESGPKVKKCEVKVNEPLIKVKIICPLKGSVEKLYDNIEYVPKKSPYVVLTKEETKLKEKLLSKLIYGLLISPTVNEKENNFKEGVIEFTLPPVVHKATVFYFICDNSKTEDDNKKGNRGIVEVYVEPYGNKINGCAFLDEDEEEEKYGNQIEEDEHNEKIKMKTFFTQNIYKKNNIYPCYMKLYSGDIGGILFPKNIKSTTCFEEMIPYNKEIKWNKENKSLGNLVNNSVVYNKEMNAKYFNVQYVHIPTSYKDTLNLFCSIILKEEESNLISTSYLVYVSINEELQFSLFDFYESFVPIKKTIQVAQKNVKLVVNTPFVAVFSNFDSSQWEKADWANGSVFNCVWKPSQVTFSNGKMILTLDREYVDHHHHHHKDEL

SEQ ID NO: 97 - DNA, 1791 bp, Artificial Sequence
  source: /note="Description of Artificial Sequence: Synthetic polynucleotide"
atgggatttgttctcttttcacaattgccttcatttcttcttgtctctacacttctcttattcctagtaatatcccactcttgccgtgcccaaaatggaggttcttatccatataagtctggtgagtatagaactaagtctttctttggatatggttattatgaagttaggatgaaggctgcaaagaacgttggaattgtttcttctttctttacttatactggaccatctgataacaacccatgggatgagattgatattgagtttcttggaaaggatactactaaggttcaattcaactggtataagaatggtgttggtggaaacgagtatcttcataaccttggatttgatgcttctcaagattttcatacttatggttttgagtggagaccagattatattgatttttatgttgatggaaagaaggtttatagaggtactagaaacattccagttactcctggaaagattatgatgaatctttggccaggaattggtgttgatgaatggcttggtagatatgatggaagaactccacttcaagctgagtatgagtatgttaagtattatccaaacggtagatctgaattcaagcttgttgttaatactccatttgttgctgttttctctaactttgattcttctcaatgggaaaaggctgattgggctaacggttctgtttttaactgtgtttggaagccatctcaagttactttttctaacggaaagatgattcttactttggatagagagtatgtcgacaacaacactaacaaagagtatgtttgcgatttcactgatcagcttaagccaactgagtctggaccaaaggttaagaagtgcgaggttaaggttaacgagccacttattaaggtgaagattatttgcccacttaagggatctgtggagaagttgtacgataacattgagtacgtgccaaagaagtctccatacgttgttcttacaaaagaagagactaagttgaaagagaagttgctttctaagttgatttacggacttcttatttctccaactgtgaacgagaaagagaacaacttcaaagagggtgttattgagttcactcttccaccagttgttcacaaggctactgtgttctacttcatttgcgataactctaagactgaggatgataacaagaagggaaacaggggtattgtggaggtttacgtggagccatacggaaacaagattaacggatgcgctttccttgatgaggatgaagaggaagagaagtacggaaaccagattgaagaggatgagcacaacgagaagattaagatgaaaactttcttcactcagaacatttacaagaagaacaacatttacccatgctacatgaagttgtactctggtgatattggaggaattcttttcccaaagaacattaagtctactacttgcttcgaagagatgattccatacaacaaagagattaagtggaacaaagagaacaagtctcttggaaacttggtgaacaactctgtggtgtataacaaagagatgaacgctaagtacttcaacgttcagtacgtgcacattccaacttcatacaaggatactcttaaccttttttgttctattattcttaaagaggaagagtctaaccttatttctacttcttaccttgtgtacgtttctattaacgaagagcttcaattctctcttttcgatttctacgagtctttcgtgcctattaagaaaactattcaggtggcacagaagaacgttgtcgaccatcatcatcatcatcataaggatgaactttga

SEQ ID NO: 98 - protein, 596 aa, Artificial Sequence
  source: /note="Description of Artificial Sequence: Synthetic polypeptide"
MGFVLFSQLPSFLLVSTLLLFLVISHSCRAQNGGSYPYKSGEYRTKSFFGYGYYEVRMKAAKNVGIVSSFFTYTGPSDNNPWDEIDIEFLGKDTTKVQFNWYKNGVGGNEYLHNLGFDASQDFHTYGFEWRPDYIDFYVDGKKVYRGTRNIPVTPGKIMMNLWPGIGVDEWLGRYDGRTPLQAEYEYVKYYPNGRSEFKLVVNTPFVAVFSNFDSSQWEKADWANGSVFNCVWKPSQVTFSNGKMILTLDREYVDNNTNKEYVCDFTDQLKPTESGPKVKKCEVKVNEPLIKVKIICPLKGSVEKLYDNIEYVPKKSPYVVLTKEETKLKEKLLSKLIYGLLISPTVNEKENNFKEGVIEFTLPPVVHKATVFYFICDNSKTEDDNKKGNRGIVEVYVEPYGNKINGCAFLDEDEEEEKYGNQIEEDEHNEKIKMKTFFTQNIYKKNNIYPCYMKLYSGDIGGILFPKNIKSTTCFEEMIPYNKEIKWNKENKSLGNLVNNSVVYNKEMNAKYFNVQYVHIPTSYKDTLNLFCSIILKEEESNLISTSYLVYVSINEELQFSLFDFYESFVPIKKTIQVAQKNVVDHHHHHHKDEL

SEQ ID NO: 99 - DNA, 1917 bp, Artificial Sequence
  source: /note="Description of Artificial Sequence: Synthetic polynucleotide"
atgggatttgttctcttttcacaattgccttcatttcttcttgtctctacacttctcttattcctagtaatatcccactcttgccgtgcccaaaatggaggttcttatccatataagtctggtgagtatagaactaagtctttctttggatatggttattatgaagttaggatgaaggctgcaaagaacgttggaattgtttcttctttctttacttatactggaccatctgataacaacccatgggatgagattgatattgagtttcttggaaaggatactactaaggttcaattcaactggtataagaatggtgttggtggaaacgagtatcttcataaccttggatttgatgcttctcaagattttcatacttatggttttgagtggagaccagattatattgatttttatgttgatggaaagaaggtttatagaggtactagaaacattccagttactcctggaaagattatgatgaatctttggccaggaattggtgttgatgaatggcttggtagatatgatggaagaactccacttcaagctgagtatgagtatgttaagtattatccaaacggtagatctaacaacaaagagcacgattacacttgcgatttcactgataagttggataagactgtgccatctactgctaacggaaagaagttgttcatctgtaggaagcaccttaaagagttcgatactttcactcttaagtgcaacgtgcaaaagactcagtacccaaacattgagattttcccaaagactcttaaggataagaaagaggtgttgaagttggatcttgatattcagtaccagatgttctctaagttcttcaagttcaacactcagaacgctaagtaccttaacctttacccttactaccttattttcccattcaaccacattggaaagaaagagcttaagaacaacccaacttacaagaaccacaaggatgtgaagtacttcgagcagagttctgtgctttctcctctttcttctgctgattctcttggaaagttgcttaacttccttgatactcaagagactgtgtgccttactgagaagattagataccttcaactttctattaacgagcttggatctgataacaacactttctctgtgactttccaggtgccaccttacattgatattaaggaaccattctacttcatgttcggatgcaacaacaacaagggagagggaaacattggaattgtggagcttttgatttctaagcaggaagagaagattaagggatgcaacttccacgagtctaagttggattacttcaacgagcagatttcttctgatactcacgagtgcactcttcatgcttacgagaacgatattattggattcaactgccttgagactactcatccaaacgaggttgaagttgaggttgaggatgctgagatttaccttcaaccagagaactgcttcaacaacgtgtacaagggacttaactctgtggatattactactattcttaagaacgctcagacttacaacattaacaacaagaaaactccaactttccttaagattccaccatacaaccttttggaggatgtggagatttcttgccagtgcactattaagcaggtggtgaaaaagatcaaagtgattattactaagaacgatactgtgcttcttaagagagaggttcagtctgagtctactcttgatgataagatttacaagaagcttgttgttaatactccatttgttgctgttttctctaactttgattcttctcaatgggaaaaggctgattgggctaacggttctgtttttaactgtgtttggaagccatctcaagttactttttctaacggaaagatgattcttactttggatagagagtatgtcgaccatcatcatcatcatcataaggatgaactttga

SEQ ID NO: 100 - protein, 638 aa, Artificial Sequence
  source: /note="Description of Artificial Sequence: Synthetic polypeptide"
MGFVLFSQLPSFLLVSTLLLFLVISHSCRAQNGGSYPYKSGEYRTKSFFGYGYYEVRMKAAKNVGIVSSFFTYTGPSDNNPWDEIDIEFLGKDTTKVQFNWYKNGVGGNEYLHNLGFDASQDFHTYGFEWRPDYIDFYVDGKKVYRGTRNIPVTPGKIMMNLWPGIGVDEWLGRYDGRTPLQAEYEYVKYYPNGRSNNKEHDYTCDFTDKLDKTVPSTANGKKLFICRKHLKEFDTFTLKCNVQKTQYPNIEIFPKTLKDKKEVLKLDLDIQYQMFSKFFKFNTQNAKYLNLYPYYLIFPFNHIGKKELKNNPTYKNHKDVKYFEQSSVLSPLSSADSLGKLLNFLDTQETVCLTEKIRYLQLSINELGSDNNTFSVTFQVPPYIDIKEPFYFMFGCNNNKGEGNIGIVELLISKQEEKIKGCNFHESKLDYFNEQISSDTHECTLHAYENDIIGFNCLETTHPNEVEVEVEDAEIYLQPENCFNNVYKGLNSVDITTILKNAQTYNINNKKTPTFLKIPPYNLLEDVEISCQCTIKQVVKKIKVIITKNDTVLLKREVQSESTLDDKIYKKLVVNTPFVAVFSNFDSSQWEKADWANGSVFNCVWKPSQVTFSNGKMILTLDREYVDHHHHHHKDEL

SEQ ID NO: 101 - DNA, 1929 bp, Artificial Sequence
  source: /note="Description of Artificial Sequence: Synthetic polynucleotide"
atgggatttgttctcttttcacaattgccttcatttcttcttgtctctacacttctcttattcctagtaatatcccactcttgccgtgcccaaaatggaggttcttatccatataagtctggtgagtatagaactaagtctttctttggatatggttattatgaagttaggatgaaggctgcaaagaacgttggaattgtttcttctttctttacttatactggaccatctgataacaacccatgggatgagattgatattgagtttcttggaaaggatactactaaggttcaattcaactggtataagaatggtgttggtggaaacgagtatcttcataaccttggatttgatgcttctcaagattttcatacttatggttttgagtggagaccagattatattgatttttatgttgatggaaagaaggtttatagaggtactagaaacattccagttactcctggaaagattatgatgaatctttggccaggaattggtgttgatgaatggcttggtagatatgatggaagaactccacttcaagctgagtatgagtatgttaagtattatccaaacggtagatctgaattcaagcttgttgttaatactccatttgttgctgttttctctaactttgattcttctcaatgggaaaaggctgattgggctaacggttctgtttttaactgtgtttggaagccatctcaagttactttttctaacggaaagatgattcttactttggatagagagtatgtcgacaacaacaaagagcacgattacacttgcgatttcactgataagttggataagactgtgccatctactgctaacggaaagaagttgttcatctgtaggaagcaccttaaagagttcgatactttcactcttaagtgcaacgtgcaaaagactcagtacccaaacattgagattttcccaaagactcttaaggataagaaagaggtgttgaagttggatcttgatattcagtaccagatgttctctaagttcttcaagttcaacactcagaacgctaagtaccttaacctttacccttactaccttattttcccattcaaccacattggaaagaaagagcttaagaacaacccaacttacaagaaccacaaggatgtgaagtacttcgagcagagttctgtgctttctcctctttcttctgctgattctcttggaaagttgcttaacttccttgatactcaagagactgtgtgccttactgagaagattagataccttcaactttctattaacgagcttggatctgataacaacactttctctgtgactttccaggtgccaccttacattgatattaaggaaccattctacttcatgttcggatgcaacaacaacaagggagagggaaacattggaattgtggagcttttgatttctaagcaggaagagaagattaagggatgcaacttccacgagtctaagttggattacttcaacgagcagatttcttctgatactcacgagtgcactcttcatgcttacgagaacgatattattggattcaactgccttgagactactcatccaaacgaggttgaagttgaggttgaggatgctgagatttaccttcaaccagagaactgcttcaacaacgtgtacaagggacttaactctgtggatattactactattcttaagaacgctcagacttacaacattaacaacaagaaaactccaactttccttaagattccaccatacaaccttttggaggatgtggagatttcttgccagtgcactattaagcaggtggtgaaaaagatcaaagtgattattactaagaacgatactgtgcttcttaagagagaggttcagtctgagtctactcttgatgataagatttacaaggtcgaccatcatcatcatcatcataaggatgaactttga

SEQ ID NO: 102 - protein, 642 aa, Artificial Sequence
  source: /note="Description of Artificial Sequence: Synthetic polypeptide"
MGFVLFSQLPSFLLVSTLLLFLVISHSCRAQNGGSYPYKSGEYRTKSFFGYGYYEVRMKAAKNVGIVSSFFTYTGPSDNNPWDEIDIEFLGKDTTKVQFNWYKNGVGGNEYLHNLGFDASQDFHTYGFEWRPDYIDFYVDGKKVYRGTRNIPVTPGKIMMNLWPGIGVDEWLGRYDGRTPLQAEYEYVKYYPNGRSEFKLVVNTPFVAVFSNFDSSQWEKADWANGSVFNCVWKPSQVTFSNGKMILTLDREYVDNNKEHDYTCDFTDKLDKTVPSTANGKKLFICRKHLKEFDTFTLKCNVQKTQYPNIEIFPKTLKDKKEVLKLDLDIQYQMFSKFFKFNTQNAKYLNLYPYYLIFPFNHIGKKELKNNPTYKNHKDVKYFEQSSVLSPLSSADSLGKLLNFLDTQETVCLTEKIRYLQLSINELGSDNNTFSVTFQVPPYIDIKEPFYFMFGCNNNKGEGNIGIVELLISKQEEKIKGCNFHESKLDYFNEQISSDTHECTLHAYENDIIGFNCLETTHPNEVEVEVEDAEIYLQPENCFNNVYKGLNSVDITTILKNAQTYNINNKKTPTFLKIPPYNLLEDVEISCQCTIKQVVKKIKVIITKNDTVLLKREVQSESTLDDKIYKVDHHHHHHKDEL

SEQ ID NO: 103 - DNA, 2022 bp, Artificial Sequence
  source: /note="Description of Artificial Sequence: Synthetic polynucleotide"
atgggatttgttctcttttcacaattgccttcatttcttcttgtctctacacttctcttattcctagtaatatcccactcttgccgtgcccaaaatggaggttcttatccatataagtctggtgagtatagaactaagtctttctttggatatggttattatgaagttaggatgaaggctgcaaagaacgttggaattgtttcttctttctttacttatactggaccatctgataacaacccatgggatgagattgatattgagtttcttggaaaggatactactaaggttcaattcaactggtataagaatggtgttggtggaaacgagtatcttcataaccttggatttgatgcttctcaagattttcatacttatggttttgagtggagaccagattatattgatttttatgttgatggaaagaaggtttatagaggtactagaaacattccagttactcctggaaagattatgatgaatctttggccaggaattggtgttgatgaatggcttggtagatatgatggaagaactccacttcaagctgagtatgagtatgttaagtattatccaaacggtagatctggtaccagatcttgcgagcacgagaacttcattaacccaagggtgcaaaagactttcgatgagaacgtggagtacacttgcaacattaagattgagaatttcttcaactacattcagattttctgcccagctaaggatcttggtatttacaagaacattcagatgtactacgatattgtgaagccaactagggttccacagttcaagaagttcaacaacgaagagcttcacaagttgattccaaactctgagatgcttcacaagacaaaagagatgcttattctttacaacgaagagaaagtggatcttcttcacttctacgtgttccttcctatttacattaaggatatttacgagttcaacattgtgtgcgataactctaagactatgtggaagaaccagcttggaggaaaagtgatttaccacattactgtgtctaagagggaacagaaagtgaagggctgttctttcgataatgagcacgctcacatgttctcttaccaaaagactaacgtgaagaactgcattattgatgcaaagccaaaggatcttattggatttgtgtgcccatctggaactcttaagttgactaactgcttcaaggatgctattgtgcacactcagcttactaacattaacggaattctttaccttaagaacaaccttgctaacttcacttacaagcaccagttcaactacatggaaattccagctcttatggataacgatatttctttcaagtgcatttgcgtggatcttaagaagaagaagtacaacgttaagtctccacttggaccaaaggttttgagggctctttacaagaagttgaacattaagttcgataactacgtgactggaactgatcagaacaagtaccttatgacttacatggatcttcacctttctcacaagaggaactaccttaaagagcttttccacgatcttggaaagaaaaagccagctgatactgatgctaacccagagtctattattgagtctctttctattaacgagtcaaacgagtctggaccattcccaactggtgatgtggatgctgaacaccttattcttgagggatacgatacttgggagtctctttacgatgagcagcttgaggaagttatttacaacgatattgagtcattggagttgaaggatattgagcagtacgtgttgcaagttaaccttaaggcacctaagttgatgatgtctgctcagattcacaagcttgttgttaatactccatttgttgctgttttctctaactttgattcttctcaatgggaaaaggctgattgggctaacggttctgtttttaactgtgtttggaagccatctcaagttactttttctaacggaaagatgattcttactttggatagagagtatgtcgacgtcgaccatcatcatcatcatcataaggatgaactttga

SEQ ID NO: 104 - protein, 673 aa, Artificial Sequence
  source: /note="Description of Artificial Sequence: Synthetic polypeptide"
MGFVLFSQLPSFLLVSTLLLFLVISHSCRAQNGGSYPYKSGEYRTKSFFGYGYYEVRMKAAKNVGIVSSFFTYTGPSDNNPWDEIDIEFLGKDTTKVQFNWYKNGVGGNEYLHNLGFDASQDFHTYGFEWRPDYIDFYVDGKKVYRGTRNIPVTPGKIMMNLWPGIGVDEWLGRYDGRTPLQAEYEYVKYYPNGRSGTRSCEHENFINPRVQKTFDENVEYTCNIKIENFFNYIQIFCPAKDLGIYKNIQMYYDIVKPTRVPQFKKFNNEELHKLIPNSEMLHKTKEMLILYNEEKVDLLHFYVFLPIYIKDIYEFNIVCDNSKTMWKNQLGGKVIYHITVSKREQKVKGCSFDNEHAHMFSYQKTNVKNCIIDAKPKDLIGFVCPSGTLKLTNCFKDAIVHTQLTNINGILYLKNNLANFTYKHQFNYMEIPALMDNDISFKCICVDLKKKKYNVKSPLGPKVLRALYKKLNIKFDNYVTGTDQNKYLMTYMDLHLSHKRNYLKELFHDLGKKKPADTDANPESIIESLSINESNESGPFPTGDVDAEHLILEGYDTWESLYDEQLEEVIYNDIESLELKDIEQYVLQVNLKAPKLMMSAQIHKLVVNTPFVAVFSNFDSSQWEKADWANGSVFNCVWKPSQVTFSNGKMILTLDREYVDVDHHHHHHKDEL

SEQ ID NO: 105 - DNA, 2028 bp, Artificial Sequence
  source: /note="Description of Artificial Sequence: Synthetic polynucleotide"
atgggatttgttctcttttcacaattgccttcatttcttcttgtctctacacttctcttattcctagtaatatcccactcttgccgtgcccaaaatggaggttcttatccatataagtctggtgagtatagaactaagtctttctttggatatggttattatgaagttaggatgaaggctgcaaagaacgttggaattgtttcttctttctttacttatactggaccatctgataacaacccatgggatgagattgatattgagtttcttggaaaggatactactaaggttcaattcaactggtataagaatggtgttggtggaaacgagtatcttcataaccttggatttgatgcttctcaagattttcatacttatggttttgagtggagaccagattatattgatttttatgttgatggaaagaaggtttatagaggtactagaaacattccagttactcctggaaagattatgatgaatctttggccaggaattggtgttgatgaatggcttggtagatatgatggaagaactccacttcaagctgagtatgagtatgttaagtattatccaaacggtagatctgaattcaagcttgttgttaatactccatttgttgctgttttctctaactttgattcttctcaatgggaaaaggctgattgggctaacggttctgtttttaactgtgtttggaagccatctcaagttactttttctaacggaaagatgattcttactttggatagagagtatgtcgacggtaccagatcttgcgagcacgagaacttcattaacccaagggtgcaaaagactttcgatgagaacgtggagtacacttgcaacattaagattgagaatttcttcaactacattcagattttctgcccagctaaggatcttggtatttacaagaacattcagatgtactacgatattgtgaagccaactagggttccacagttcaagaagttcaacaacgaagagcttcacaagttgattccaaactctgagatgcttcacaagacaaaagagatgcttattctttacaacgaagagaaagtggatcttcttcacttctacgtgttccttcctatttacattaaggatatttacgagttcaacattgtgtgcgataactctaagactatgtggaagaaccagcttggaggaaaagtgatttaccacattactgtgtctaagagggaacagaaagtgaagggctgttctttcgataatgagcacgctcacatgttctcttaccaaaagactaacgtgaagaactgcattattgatgcaaagccaaaggatcttattggatttgtgtgcccatctggaactcttaagttgactaactgcttcaaggatgctattgtgcacactcagcttactaacattaacggaattctttaccttaagaacaaccttgctaacttcacttacaagcaccagttcaactacatggaaattccagctcttatggataacgatatttctttcaagtgcatttgcgtggatcttaagaagaagaagtacaacgttaagtctccacttggaccaaaggttttgagggctctttacaagaagttgaacattaagttcgataactacgtgactggaactgatcagaacaagtaccttatgacttacatggatcttcacctttctcacaagaggaactaccttaaagagcttttccacgatcttggaaagaaaaagccagctgatactgatgctaacccagagtctattattgagtctctttctattaacgagtcaaacgagtctggaccattcccaactggtgatgtggatgctgaacaccttattcttgagggatacgatacttgggagtctctttacgatgagcagcttgaggaagttatttacaacgatattgagtcattggagttgaaggatattgagcagtacgtgttgcaagttaaccttaaggcacctaagttgatgatgtctgctcagattcacgtcgaccatcatcatcatcatcataaggatgaactttga

SEQ ID NO: 106 - protein, 675 aa, Artificial Sequence
  source: /note="Description of Artificial Sequence: Synthetic polypeptide"
MGFVLFSQLPSFLLVSTLLLFLVISHSCRAQNGGSYPYKSGEYRTKSFFGYGYYEVRMKAAKNVGIVSSFFTYTGPSDNNPWDEIDIEFLGKDTTKVQFNWYKNGVGGNEYLHNLGFDASQDFHTYGFEWRPDYIDFYVDGKKVYRGTRNIPVTPGKIMMNLWPGIGVDEWLGRYDGRTPLQAEYEYVKYYPNGRSEFKLVVNTPFVAVFSNFDSSQWEKADWANGSVFNCVWKPSQVTFSNGKMILTLDREYVDGTRSCEHENFINPRVQKTFDENVEYTCNIKIENFFNYIQIFCPAKDLGIYKNIQMYYDIVKPTRVPQFKKFNNEELHKLIPNSEMLHKTKEMLILYNEEKVDLLHFYVFLPIYIKDIYEFNIVCDNSKTMWKNQLGGKVIYHITVSKREQKVKGCSFDNEHAHMFSYQKTNVKNCIIDAKPKDLIGFVCPSGTLKLTNCFKDAIVHTQLTNINGILYLKNNLANFTYKHQFNYMEIPALMDNDISFKCICVDLKKKKYNVKSPLGPKVLRALYKKLNIKFDNYVTGTDQNKYLMTYMDLHLSHKRNYLKELFHDLGKKKPADTDANPESIIESLSINESNESGPFPTGDVDAEHLILEGYDTWESLYDEQLEEVIYNDIESLELKDIEQYVLQVNLKAPKLMMSAQIHVDHHHHHHKDEL

SEQ ID NO: 107 - DNA, 1872 bp, Artificial Sequence
  source: /note="Description of Artificial Sequence: Synthetic polynucleotide"
atgggatttgttctcttttcacaattgccttcatttcttcttgtctctacacttctcttattcctagtaatatcccactcttgccgtgcccaaaatggaggttcttatccatataagtctggtgagtatagaactaagtctttctttggatatggttattatgaagttaggatgaaggctgcaaagaacgttggaattgtttcttctttctttacttatactggaccatctgataacaacccatgggatgagattgatattgagtttcttggaaaggatactactaaggttcaattcaactggtataagaatggtgttggtggaaacgagtatcttcataaccttggatttgatgcttctcaagattttcatacttatggttttgagtggagaccagattatattgatttttatgttgatggaaagaaggtttatagaggtactagaaacattccagttactcctggaaagattatgatgaatctttggccaggaattggtgttgatgaatggcttggtagatatgatggaagaactccacttcaagctgagtatgagtatgttaagtattatccaaacggtagatctaacaacaggcatgtgtgcgatttctctaagaacaaccttattgtgccagagtctcttaagaagaaagaagagcttggaggaaacccagttaacattcactgctacgctttgcttaagccacttgatacactttacgtgaagtgcccaacttctaaggataactacgaggctgctaaggtgaacatttctgagaacgataacgagtacgagcttcaagtgatttctcttattgagaagaggttccacaacttcgagactcttgagtctaaaaagcctggaaacggtgatgttgttgtgcacaacggtgttgttgatactggaccagtgcttgataactctactttcgagaagtacttcaagaacattaagattaagccagataagttcttcgagaaagtgattaacgagtatgatgatactgaggaagagaaggatcttgagtctattcttccaggtgctattgtgtctccaatgaaggtgttgaagaagaaagatcctttcacttcttacgctgctttcgtggttccaccaattgtgccaaaggatcttcacttcaaggtggagtgcaacaacactgagtacaaggatgagaaccagtacatttctggatacaacggaattattcacattgatatttctaactctaacaggaagattaacggttgcgatttctcaactaacaactcttctattcttacttcttctgtgaagttggtgaacggtgaaactaagaactgcgagattaacattaacaacaacgaggtgttcggaattatttgcgataacgagactaaccttgatccagagaagtgcttccacgagatttactctaaggatcaaaagactgtgaagaagttcagggaagttattccaaatattgatattttctctcttcacaactcaaacaagaagaaggttgcatacgctaaggtgccacttgattacattaacaagttgcttttctcttgttcttgcaagacttctcacactaacactattggaactatgaaggtgacacttaataaggatgagaaagaggaagaggatttcaagactgctcagggtattaagcacgaattcaagcttgttgttaatactccatttgttgctgttttctctaactttgattcttctcaatgggaaaaggctgattgggctaacggttctgtttttaactgtgtttggaagccatctcaagttactttttctaacggaaagatgattcttactttggatagagagtatgtcgaccatcatcatcatcatcataaggatgaactttga

SEQ ID NO: 108 - protein, 623 aa, Artificial Sequence
  source: /note="Description of Artificial Sequence: Synthetic polypeptide"
MGFVLFSQLPSFLLVSTLLLFLVISHSCRAQNGGSYPYKSGEYRTKSFFGYGYYEVRMKAAKNVGIVSSFFTYTGPSDNNPWDEIDIEFLGKDTTKVQFNWYKNGVGGNEYLHNLGFDASQDFHTYGFEWRPDYIDFYVDGKKVYRGTRNIPVTPGKIMMNLWPGIGVDEWLGRYDGRTPLQAEYEYVKYYPNGRSNNRHVCDFSKNNLIVPESLKKKEELGGNPVNIHCYALLKPLDTLYVKCPTSKDNYEAAKVNISENDNEYELQVISLIEKRFHNFETLESKKPGNGDVVVHNGVVDTGPVLDNSTFEKYFKNIKIKPDKFFEKVINEYDDTEEEKDLESILPGAIVSPMKVLKKKDPFTSYAAFVVPPIVPKDLHFKVECNNTEYKDENQYISGYNGIIHIDISNSNRKINGCDFSTNNSSILTSSVKLVNGETKNCEININNNEVFGIICDNETNLDPEKCFHEIYSKDQKTVKKFREVIPNIDIFSLHNSNKKKVAYAKVPLDYINKLLFSCSCKTSHTNTIGTMKVTLNKDEKEEEDFKTAQGIKHEFKLVVNTPFVAVFSNFDSSQWEKADWANGSVFNCVWKPSQVTFSNGKMILTLDREYVDHHHHHHKDEL

SEQ ID NO: 109 - DNA, 1878 bp, Artificial Sequence
  source: /note="Description of Artificial Sequence: Synthetic polynucleotide"
atgggatttgttctcttttcacaattgccttcatttcttcttgtctctacacttctcttattcctagtaatatcccactcttgccgtgcccaaaatggaggttcttatccatataagtctggtgagtatagaactaagtctttctttggatatggttattatgaagttaggatgaaggctgcaaagaacgttggaattgtttcttctttctttacttatactggaccatctgataacaacccatgggatgagattgatattgagtttcttggaaaggatactactaaggttcaattcaactggtataagaatggtgttggtggaaacgagtatcttcataaccttggatttgatgcttctcaagattttcatacttatggttttgagtggagaccagattatattgatttttatgttgatggaaagaaggtttatagaggtactagaaacattccagttactcctggaaagattatgatgaatctttggccaggaattggtgttgatgaatggcttggtagatatgatggaagaactccacttcaagctgagtatgagtatgttaagtattatccaaacggtagatctgaattcaagcttgttgttaatactccatttgttgctgttttctctaactttgattcttctcaatgggaaaaggctgattgggctaacggttctgtttttaactgtgtttggaagccatctcaagttactttttctaacggaaagatgattcttactttggatagagagtatgtcgacaacaacaggcatgtgtgcgatttctctaagaacaaccttattgtgccagagtctcttaagaagaaagaagagcttggaggaaacccagttaacattcactgctacgctttgcttaagccacttgatacactttacgtgaagtgcccaacttctaaggataactacgaggctgctaaggtgaacatttctgagaacgataacgagtacgagcttcaagtgatttctcttattgagaagaggttccacaacttcgagactcttgagtctaaaaagcctggaaacggtgatgttgttgtgcacaacggtgttgttgatactggaccagtgcttgataactctactttcgagaagtacttcaagaacattaagattaagccagataagttcttcgagaaagtgattaacgagtatgatgatactgaggaagagaaggatcttgagtctattcttccaggtgctattgtgtctccaatgaaggtgttgaagaagaaagatcctttcacttcttacgctgctttcgtggttccaccaattgtgccaaaggatcttcacttcaaggtggagtgcaacaacactgagtacaaggatgagaaccagtacatttctggatacaacggaattattcacattgatatttctaactctaacaggaagattaacggttgcgatttctcaactaacaactcttctattcttacttcttctgtgaagttggtgaacggtgaaactaagaactgcgagattaacattaacaacaacgaggtgttcggaattatttgcgataacgagactaaccttgatccagagaagtgcttccacgagatttactctaaggatcaaaagactgtgaagaagttcagggaagttattccaaatattgatattttctctcttcacaactcaaacaagaagaaggttgcatacgctaaggtgccacttgattacattaacaagttgcttttctcttgttcttgcaagacttctcacactaacactattggaactatgaaggtgacacttaataaggatgagaaagaggaagaggatttcaagactgctcagggtattaagcacgtcgaccatcatcatcatcatcataaggatgaactttga

SEQ ID NO: 110 - protein, 625 aa, Artificial Sequence
  source: /note="Description of Artificial Sequence: Synthetic polypeptide"
MGFVLFSQLPSFLLVSTLLLFLVISHSCRAQNGGSYPYKSGEYRTKSFFGYGYYEVRMKAAKNVGIVSSFFTYTGPSDNNPWDEIDIEFLGKDTTKVQFNWYKNGVGGNEYLHNLGFDASQDFHTYGFEWRPDYIDFYVDGKKVYRGTRNIPVTPGKIMMNLWPGIGVDEWLGRYDGRTPLQAEYEYVKYYPNGRSEFKLVVNTPFVAVFSNFDSSQWEKADWANGSVFNCVWKPSQVTFSNGKMILTLDREYVDNNRHVCDFSKNNLIVPESLKKKEELGGNPVNIHCYALLKPLDTLYVKCPTSKDNYEAAKVNISENDNEYELQVISLIEKRFHNFETLESKKPGNGDVVVHNGVVDTGPVLDNSTFEKYFKNIKIKPDKFFEKVINEYDDTEEEKDLESILPGAIVSPMKVLKKKDPFTSYAAFVVPPIVPKDLHFKVECNNTEYKDENQYISGYNGIIHIDISNSNRKINGCDFSTNNSSILTSSVKLVNGETKNCEININNNEVFGIICDNETNLDPEKCFHEIYSKDQKTVKKFREVIPNIDIFSLHNSNKKKVAYAKVPLDYINKLLFSCSCKTSHTNTIGTMKVTLNKDEKEEEDFKTAQGIKHVDHHHHHHKDEL

SEQ ID NO: 111 - DNA, 1986 bp, Artificial Sequence
  source: /note="Description of Artificial Sequence: Synthetic polynucleotide"
atgggatttgttctcttttcacaattgccttcatttcttcttgtctctacacttctcttattcctagtaatatcccactcttgccgtgcccaaaatggaggttcttatccatataagtctggtgagtatagaactaagtctttctttggatatggttattatgaagttaggatgaaggctgcaaagaacgttggaattgtttcttctttctttacttatactggaccatctgataacaacccatgggatgagattgatattgagtttcttggaaaggatactactaaggttcaattcaactggtataagaatggtgttggtggaaacgagtatcttcataaccttggatttgatgcttctcaagattttcatacttatggttttgagtggagaccagattatattgatttttatgttgatggaaagaaggtttatagaggtactagaaacattccagttactcctggaaagattatgatgaatctttggccaggaattggtgttgatgaatggcttggtagatatgatggaagaactccacttcaagctgagtatgagtatgttaagtattatccaaacggtagatctaacaacgtgcacttgtgcaatttcttcgataacccagagcttactttcgataacaacaagattgtgttgtgcaagattgatgctgagttgttctctgaagtgattattcagcttccaattttcggaactaagaacgtggaagagggtgttcagaacgaagagtacaagaagttctctcttaagccatctcttgtgttcgatgataacaacaacgatattaaggtgatcggaaaagagaagaacgaggtttcaatttctcttgctcttaagggagtgtacggaaacaggattttcactttcgataagaacggaaagaagggtgaaggtattagtttcttcattccacctattaagcaggatactgatcttaagttcattattaacgagactattgataactctaacattaagcagcgtggacttatttacatttttgtgaggaagaacgtgtctgagaactctttcaagttgtgcgatttcactactggatctacttctcttatggaacttaactctcaggtgaaagaaaagaagtgcactgttaagattaagaagggtgatattttcggacttaagtgcccaaagggattcgctattttcccacaggcttgcttctctaacgtgcttcttgagtactacaagtctgattacgaggattctgagcacattaactactacattcacaaggataagaagtacaaccttaagccaaaggatgtgattgagcttatggatgagaacttcagagagcttcaaaacattcagcagtacactggaatttctcagattactgatgtgcttcacttcaagaacttcaaccttggaaaccttccacttaacttcaagaaccactactctactgcttacgctaaggtgccagatactttcaactctattattaacttctcttgcaactgctacaatccagagaagcacgtgtacggaactatgcaagtggagtctgataacaggaacttcgataacattaagaagaacgagaacgttattaagaacttccttcttccaaacattgagaagtacgctttgcttcttgatgatgaagagaggcagaagaagattaagcagcagcaagaggaagaacagcaagagcagattcttaaggatcaggatgataggctttctaggcacgatgattacaacaagaaccacacttacattctttacgattctaacaagcttgttgttaatactccatttgttgctgttttctctaactttgattcttctcaatgggaaaaggctgattgggctaacggttctgtttttaactgtgtttggaagccatctcaagttactttttctaacggaaagatgattcttactttggatagagagtatgtcgaccatcatcatcatcatcataaggatgaactttga

SEQ ID NO: 112 - protein, 661 aa, Artificial Sequence
  source: /note="Description of Artificial Sequence: Synthetic polypeptide"
MGFVLFSQLPSFLLVSTLLLFLVISHSCRAQNGGSYPYKSGEYRTKSFFGYGYYEVRMKAAKNVGIVSSFFTYTGPSDNNPWDEIDIEFLGKDTTKVQFNWYKNGVGGNEYLHNLGFDASQDFHTYGFEWRPDYIDFYVDGKKVYRGTRNIPVTPGKIMMNLWPGIGVDEWLGRYDGRTPLQAEYEYVKYYPNGRSNNVHLCNFFDNPELTFDNNKIVLCKIDAELFSEVIIQLPIFGTKNVEEGVQNEEYKKFSLKPSLVFDDNNNDIKVIGKEKNEVSISLALKGVYGNRIFTFDKNGKKGEGISFFIPPIKQDTDLKFIINETIDNSNIKQRGLIYIFVRKNVSENSFKLCDFTTGSTSLMELNSQVKEKKCTVKIKKGDIFGLKCPKGFAIFPQACFSNVLLEYYKSDYEDSEHINYYIHKDKKYNLKPKDVIELMDENFRELQNIQQYTGISQITDVLHFKNFNLGNLPLNFKNHYSTAYAKVPDTFNSIINFSCNCYNPEKHVYGTMQVESDNRNFDNIKKNENVIKNFLLPNIEKYALLLDDEERQKKIKQQQEEEQQEQILKDQDDRLSRHDDYNKNHTYILYDSNKLVVNTPFVAVFSNFDSSQWEKADWANGSVFNCVWKPSQVTFSNGKMILTLDREYVDHHHHHHKDEL

SEQ ID NO: 113 - DNA, 1998 bp, Artificial Sequence
  source: /note="Description of Artificial Sequence: Synthetic polynucleotide"
atgggatttgttctcttttcacaattgccttcatttcttcttgtctctacacttctcttattcctagtaatatcccactcttgccgtgcccaaaatggaggttcttatccatataagtctggtgagtatagaactaagtctttctttggatatggttattatgaagttaggatgaaggctgcaaagaacgttggaattgtttcttctttctttacttatactggaccatctgataacaacccatgggatgagattgatattgagtttcttggaaaggatactactaaggttcaattcaactggtataagaatggtgttggtggaaacgagtatcttcataaccttggatttgatgcttctcaagattttcatacttatggttttgagtggagaccagattatattgatttttatgttgatggaaagaaggtttatagaggtactagaaacattccagttactcctggaaagattatgatgaatctttggccaggaattggtgttgatgaatggcttggtagatatgatggaagaactccacttcaagctgagtatgagtatgttaagtattatccaaacggtagatctgaattcaagcttgttgttaatactccatttgttgctgttttctctaactttgattcttctcaatgggaaaaggctgattgggctaacggttctgtttttaactgtgtttggaagccatctcaagttactttttctaacggaaagatgattcttactttggatagagagtatgtcgacaacaacgtgcacttgtgcaatttcttcgataacccagagcttactttcgataacaacaagattgtgttgtgcaagattgatgctgagttgttctctgaagtgattattcagcttccaattttcggaactaagaacgtggaagagggtgttcagaacgaagagtacaagaagttctctcttaagccatctcttgtgttcgatgataacaacaacgatattaaggtgatcggaaaagagaagaacgaggtttcaatttctcttgctcttaagggagtgtacggaaacaggattttcactttcgataagaacggaaagaagggtgaaggtattagtttcttcattccacctattaagcaggatactgatcttaagttcattattaacgagactattgataactctaacattaagcagcgtggacttatttacatttttgtgaggaagaacgtgtctgagaactctttcaagttgtgcgatttcactactggatctacttctcttatggaacttaactctcaggtgaaagaaaagaagtgcactgttaagattaagaagggtgatattttcggacttaagtgcccaaagggattcgctattttcccacaggcttgcttctctaacgtgcttcttgagtactacaagtctgattacgaggattctgagcacattaactactacattcacaaggataagaagtacaaccttaagccaaaggatgtgattgagcttatggatgagaacttcagagagcttcaaaacattcagcagtacactggaatttctcagattactgatgtgcttcacttcaagaacttcaaccttggaaaccttccacttaacttcaagaaccactactctactgcttacgctaaggtgccagatactttcaactctattattaacttctcttgcaactgctacaatccagagaagcacgtgtacggaactatgcaagtggagtctgataacaggaacttcgataacattaagaagaacgagaacgttattaagaacttccttcttccaaacattgagaagtacgctttgcttcttgatgatgaagagaggcagaagaagattaagcagcagcaagaggaagaacagcaagagcagattcttaaggatcaggatgataggctttctaggcacgatgattacaacaagaaccacacttacattctttacgattctaacgtcgaccatcatcatcatcatcataaggatgaactttga

SEQ ID NO: 114 - protein, 608 aa, Artificial Sequence
  source: /note="Description of Artificial Sequence: Synthetic polypeptide"
MGFVLFSQLPSFLLVSTLLLFLVISHSCRAQNGGSYPYKSGEYRTKSFFGYGYYEVRMKAAKNVGIVSSFFTYTGPSDNNPWDEIDIEFLGKDTTKVQFNWYKNGVGGNEYLHNLGFDASQDFHTYGFEWRPDYIDFYVDGKKVYRGTRNIPVTPGKIMMNLWPGIGVDEWLGRYDGRTPLQAEYEYVKYYPNGRSVDNNVHLCNFFDNPELTFDNNKIVLCKIDAELFSEVIIQLPIFGTKNVEEGVQNEEYKKFSLKPSLVFDDNNNDIKVIGKEKNEVSISLALKGVYGNRIFTFDKNGKKGEGISFFIPPIKQDTDLKFIINETIDNSNIKQRGLIYIFVRKNVSENSFKLCDFTTGSTSLMELNSQVKEKKCTVKIKKGDIFGLKCPKGFAIFPQACFSNVLLEYYKSDYEDSEHINYYIHKDKKYNLKPKDVIELMDENFRELQNIQQYTGISQITDVLHFKNFNLGNLPLNFKNHYSTAYAKVPDTFNSIINFSCNCYNPEKHVYGTMQVESDNRNFDNIKKNENVIKNFLLPNIEKYALLLDDEERQKKIKQQQEEEQQEQILKDQDDRLSRHDDYNKNHTYILYDSNVDHHHHHHKDEL

SEQ ID NO: 115 - DNA, 1950 bp, Artificial Sequence
  source: /note="Description of Artificial Sequence: Synthetic polynucleotide"
atgggatttgttctcttttcacaattgccttcatttcttcttgtctctacacttctcttattcctagtaatatcccactcttgccgtgcccaaaatggaggttcttatccatataagtctggtgagtatagaactaagtctttctttggatatggttattatgaagttaggatgaaggctgcaaagaacgttggaattgtttcttctttctttacttatactggaccatctgataacaacccatgggatgagattgatattgagtttcttggaaaggatactactaaggttcaattcaactggtataagaatggtgttggtggaaacgagtatcttcataaccttggatttgatgcttctcaagattttcatacttatggttttgagtggagaccagattatattgatttttatgttgatggaaagaaggtttatagaggtactagaaacattccagttactcctggaaagattatgatgaatctttggccaggaattggtgttgatgaatggcttggtagatatgatggaagaactccacttcaagctgagtatgagtatgttaagtattatccaaacggtagatctgagcacatttgcgattacgagaagaacgagtctcttatttctactcttccaaacgatacaaagaagattcagaagtctatctgcaagattaacgctaaggctcttgatgtggtgactattaagtgcccacacactaagaacttcactccaaaggattacttcccaaactcttctcttattactaacgataagaaaattgtgattactttcgataagaagaacttcgttacttacattgatccaactaagaaaactttctctcttaaggatatttacattcagtctttctacggtgtgtctcttgatcaccttaaccagattaaaaagattcacgaggaatgggatgatgtgcaccttttctacccaccacacaacgttcttcacaacgtggtgcttaacaaccacattgtgaacctttcttcagctcttgagggtgttcttttcatgaagtctaaggtgacaggtgatgagactgctactaagaagaacactactcttcctactgatggtgtgtcatctattcttattccaccatacgtgaaagaggatattactttccaccttttctgcggaaagtctactactaagaagccaaacaagaagaacacatctcttgctcttattcacattcacatttcttctaacaggaacattattcacggttgcgatttcctttaccttgagaaccagactaacgatgctatttctaataacaacaacaactcttactctattttcactcacaacaagaacactgagaacaaccttatttgcgatatttctcttattccaaagactgtgattggtattaagtgtcctaacaagaagttgaacccacagacttgcttcgatgaggtgtactacgtgaagcaagaggatgtgccatctaagactattactgctgataagtacaacactttctctaaggataagattggaaacattcttaagaacgctattagtattaacaacccagatgagaaggataacacttacacttaccttattcttccagagaagttcgaggaagagcttattgatacaaagaaagtgcttgcttgcacttgcgataacaagtacattattcacatgaagattgagaagtcaactatggataagattaagattgatgagaagaaaactattggaaaggatattaagcttgttgttaatactccatttgttgctgttttctctaactttgattcttctcaatgggaaaaggctgattgggctaacggttctgtttttaactgtgtttggaagccatctcaagttactttttctaacggaaagatgattcttactttggatagagagtatgtcgaccatcatcatcatcatcataaggatgaactttga

SEQ ID NO: 116 - protein, 649 aa, Artificial Sequence
  source: /note="Description of Artificial Sequence: Synthetic polypeptide"
MGFVLFSQLPSFLLVSTLLLFLVISHSCRAQNGGSYPYKSGEYRTKSFFGYGYYEVRMKAAKNVGIVSSFFTYTGPSDNNPWDEIDIEFLGKDTTKVQFNWYKNGVGGNEYLHNLGFDASQDFHTYGFEWRPDYIDFYVDGKKVYRGTRNIPVTPGKIMMNLWPGIGVDEWLGRYDGRTPLQAEYEYVKYYPNGRSEHICDYEKNESLISTLPNDTKKIQKSICKINAKALDVVTIKCPHTKNFTPKDYFPNSSLITNDKKIVITFDKKNFVTYIDPTKKTFSLKDIYIQSFYGVSLDHLNQIKKIHEEWDDVHLFYPPHNVLHNVVLNNHIVNLSSALEGVLFMKSKVTGDETATKKNTTLPTDGVSSILIPPYVKEDITFHLFCGKSTTKKPNKKNTSLALIHIHISSNRNIIHGCDFLYLENQTNDAISNNNNNSYSIFTHNKNTENNLICDISLIPKTVIGIKCPNKKLNPQTCFDEVYYVKQEDVPSKTITADKYNTFSKDKIGNILKNAISINNPDEKDNTYTYLILPEKFEEELIDTKKVLACTCDNKYIIHMKIEKSTMDKIKIDEKKTIGKDIKLVVNTPFVAVFSNFDSSQWEKADWANGSVFNCVWKPSQVTFSNGKMILTLDREYVDHHHHHHKDEL

SEQ ID NO: 117 - DNA, 1962 bp, Artificial Sequence
  source: /note="Description of Artificial Sequence: Synthetic polynucleotide"
atgggatttgttctcttttcacaattgccttcatttcttcttgtctctacacttctcttattcctagtaatatcccactcttgccgtgcccaaaatggaggttcttatccatataagtctggtgagtatagaactaagtctttctttggatatggttattatgaagttaggatgaaggctgcaaagaacgttggaattgtttcttctttctttacttatactggaccatctgataacaacccatgggatgagattgatattgagtttcttggaaaggatactactaaggttcaattcaactggtataagaatggtgttggtggaaacgagtatcttcataaccttggatttgatgcttctcaagattttcatacttatggttttgagtggagaccagattatattgatttttatgttgatggaaagaaggtttatagaggtactagaaacattccagttactcctggaaagattatgatgaatctttggccaggaattggtgttgatgaatggcttggtagatatgatggaagaactccacttcaagctgagtatgagtatgttaagtattatccaaacggtagatctgaattcaagcttgttgttaatactccatttgttgctgttttctctaactttgattcttctcaatgggaaaaggctgattgggctaacggttctgtttttaactgtgtttggaagccatctcaagttactttttctaacggaaagatgattcttactttggatagagagtatgtcgacgagcacatttgcgattacgagaagaacgagtctcttatttctactcttccaaacgatacaaagaagattcagaagtctatctgcaagattaacgctaaggctcttgatgtggtgactattaagtgcccacacactaagaacttcactccaaaggattacttcccaaactcttctcttattactaacgataagaaaattgtgattactttcgataagaagaacttcgttacttacattgatccaactaagaaaactttctctcttaaggatatttacattcagtctttctacggtgtgtctcttgatcaccttaaccagattaaaaagattcacgaggaatgggatgatgtgcaccttttctacccaccacacaacgttcttcacaacgtggtgcttaacaaccacattgtgaacctttcttcagctcttgagggtgttcttttcatgaagtctaaggtgacaggtgatgagactgctactaagaagaacactactcttcctactgatggtgtgtcatctattcttattccaccatacgtgaaagaggatattactttccaccttttctgcggaaagtctactactaagaagccaaacaagaagaacacatctcttgctcttattcacattcacatttcttctaacaggaacattattcacggttgcgatttcctttaccttgagaaccagactaacgatgctatttctaataacaacaacaactcttactctattttcactcacaacaagaacactgagaacaaccttatttgcgatatttctcttattccaaagactgtgattggtattaagtgtcctaacaagaagttgaacccacagacttgcttcgatgaggtgtactacgtgaagcaagaggatgtgccatctaagactattactgctgataagtacaacactttctctaaggataagattggaaacattcttaagaacgctattagtattaacaacccagatgagaaggataacacttacacttaccttattcttccagagaagttcgaggaagagcttattgatacaaagaaagtgcttgcttgcacttgcgataacaagtacattattcacatgaagattgagaagtcaactatggataagattaagattgatgagaagaaaactattggaaaggatattgtcgaccatcatcatcatcatcataaggatgaactttga

SEQ ID NO: 118 - protein, 653 aa, Artificial Sequence
  source: /note="Description of Artificial Sequence: Synthetic polypeptide"
MGFVLFSQLPSFLLVSTLLLFLVISHSCRAQNGGSYPYKSGEYRTKSFFGYGYYEVRMKAAKNVGIVSSFFTYTGPSDNNPWDEIDIEFLGKDTTKVQFNWYKNGVGGNEYLHNLGFDASQDFHTYGFEWRPDYIDFYVDGKKVYRGTRNIPVTPGKIMMNLWPGIGVDEWLGRYDGRTPLQAEYEYVKYYPNGRSEFKLVVNTPFVAVFSNFDSSQWEKADWANGSVFNCVWKPSQVTFSNGKMILTLDREYVDEHICDYEKNESLISTLPNDTKKIQKSICKINAKALDVVTIKCPHTKNFTPKDYFPNSSLITNDKKIVITFDKKNFVTYIDPTKKTFSLKDIYIQSFYGVSLDHLNQIKKIHEEWDDVHLFYPPHNVLHNVVLNNHIVNLSSALEGVLFMKSKVTGDETATKKNTTLPTDGVSSILIPPYVKEDITFHLFCGKSTTKKPNKKNTSLALIHIHISSNRNIIHGCDFLYLENQTNDAISNNNNNSYSIFTHNKNTENNLICDISLIPKTVIGIKCPNKKLNPQTCFDEVYYVKQEDVPSKTITADKYNTFSKDKIGNILKNAISINNPDEKDNTYTYLILPEKFEEELIDTKKVLACTCDNKYIIHMKIEKSTMDKIKIDEKKTIGKDIVDHHHHHHKDEL

SEQ ID NO: 119 - DNA, 1695 bp, Artificial Sequence
  source: /note="Description of Artificial Sequence: Synthetic polynucleotide"
atgggatttgttctcttttcacaattgccttcatttcttcttgtctctacacttctcttattcctagtaatatcccactcttgccgtgcccaaaatggaggttcttatccatataagtctggtgagtatagaactaagtctttctttggatatggttattatgaagttaggatgaaggctgcaaagaacgttggaattgtttcttctttctttacttatactggaccatctgataacaacccatgggatgagattgatattgagtttcttggaaaggatactactaaggttcaattcaactggtataagaatggtgttggtggaaacgagtatcttcataaccttggatttgatgcttctcaagattttcatacttatggttttgagtggagaccagattatattgatttttatgttgatggaaagaaggtttatagaggtactagaaacattccagttactcctggaaagattatgatgaatctttggccaggaattggtgttgatgaatggcttggtagatatgatggaagaactccacttcaagctgagtatgagtatgttaagtattatccaaacggtagatcttgcaagtacgatgtgactactaaggttgcaacttgcgagattattgatacaattgattcttctgtgcttaaagagcaccacactgttcactactctattactttgtctagatgggataagttgattattaagtacccaactaacgaaaagactcacttcgagaatttcttcgtgaacccattcaaccttaaggataaggtgttgtacaactacaacaagcctattaacattgagcacattcttccaggtgctattactactgatatttacgatacaaggactaagattaagcagtacattcttaggattccaccatacgtgcacaaggatattcacttctctcttgagttcaacaactctctttctcttactaagcagaaccagaacattatttacggaaacgtggctaagattttcattcacattaaccagggatacaaagagattcacggttgcgatttcactggaaagtactctcaccttttcacttactctaaaaagccacttccaaacgatgatgatatctgcaacgtgactattggaaacaacactttctctggattcgcttgcctttctcactttgagcttaagccaaacaactgcttctcttctgtgtacgattacaacgaggctaacaaggtgaagaagttgttcgatctttctactaaggtggagcttgatcacattaagcagaacacttcaggatacactttgtcttacattattttcaacaaagagtctactaagttgaagttctcttgcacttgttcttctaactactcaaactacactattaggattactttcgatccaaactacattattccagagccacagtctagggctattattaagtatgtggatcttcaagataagaacttcgctaagtaccttaggaagttgaagcttgttgttaatactccatttgttgctgttttctctaactttgattcttctcaatgggaaaaggctgattgggctaacggttctgtttttaactgtgtttggaagccatctcaagttactttttctaacggaaagatgattcttactttggatagagagtatgtcgaccatcatcatcatcatcataaggatgaactttga

SEQ ID NO: 120 - protein, 564 aa, Artificial Sequence
  source: /note="Description of Artificial Sequence: Synthetic polypeptide"
MGFVLFSQLPSFLLVSTLLLFLVISHSCRAQNGGSYPYKSGEYRTKSFFGYGYYEVRMKAAKNVGIVSSFFTYTGPSDNNPWDEIDIEFLGKDTTKVQFNWYKNGVGGNEYLHNLGFDASQDFHTYGFEWRPDYIDFYVDGKKVYRGTRNIPVTPGKIMMNLWPGIGVDEWLGRYDGRTPLQAEYEYVKYYPNGRSCKYDVTTKVATCEIIDTIDSSVLKEHHTVHYSITLSRWDKLIIKYPTNEKTHFENFFVNPFNLKDKVLYNYNKPINIEHILPGAITTDIYDTRTKIKQYILRIPPYVHKDIHFSLEFNNSLSLTKQNQNIIYGNVAKIFIHINQGYKEIHGCDFTGKYSHLFTYSKKPLPNDDDICNVTIGNNTFSGFACLSHFELKPNNCFSSVYDYNEANKVKKLFDLSTKVELDHIKQNTSGYTLSYIIFNKESTKLKFSCTCSSNYSNYTIRITFDPNYIIPEPQSRAIIKYVDLQDKNFAKYLRKLKLVVNTPFVAVFSNFDSSQWEKADWANGSVFNCVWKPSQVTFSNGKMILTLDREYVDHHHHHHKDEL

SEQ ID NO: 121 - DNA, 1707 bp, Artificial Sequence
  source: /note="Description of Artificial Sequence: Synthetic polynucleotide"
atgggatttgttctcttttcacaattgccttcatttcttcttgtctctacacttctcttattcctagtaatatcccactcttgccgtgcccaaaatggaggttcttatccatataagtctggtgagtatagaactaagtctttctttggatatggttattatgaagttaggatgaaggctgcaaagaacgttggaattgtttcttctttctttacttatactggaccatctgataacaacccatgggatgagattgatattgagtttcttggaaaggatactactaaggttcaattcaactggtataagaatggtgttggtggaaacgagtatcttcataaccttggatttgatgcttctcaagattttcatacttatggttttgagtggagaccagattatattgatttttatgttgatggaaagaaggtttatagaggtactagaaacattccagttactcctggaaagattatgatgaatctttggccaggaattggtgttgatgaatggcttggtagatatgatggaagaactccacttcaagctgagtatgagtatgttaagtattatccaaacggtagatctgaattcaagcttgttgttaatactccatttgttgctgttttctctaactttgattcttctcaatgggaaaaggctgattgggctaacggttctgtttttaactgtgtttggaagccatctcaagttactttttctaacggaaagatgattcttactttggatagagagtatgtcgactgcaagtacgatgtgactactaaggttgcaacttgcgagattattgatacaattgattcttctgtgcttaaagagcaccacactgttcactactctattactttgtctagatgggataagttgattattaagtacccaactaacgaaaagactcacttcgagaatttcttcgtgaacccattcaaccttaaggataaggtgttgtacaactacaacaagcctattaacattgagcacattcttccaggtgctattactactgatatttacgatacaaggactaagattaagcagtacattcttaggattccaccatacgtgcacaaggatattcacttctctcttgagttcaacaactctctttctcttactaagcagaaccagaacattatttacggaaacgtggctaagattttcattcacattaaccagggatacaaagagattcacggttgcgatttcactggaaagtactctcaccttttcacttactctaaaaagccacttccaaacgatgatgatatctgcaacgtgactattggaaacaacactttctctggattcgcttgcctttctcactttgagcttaagccaaacaactgcttctcttctgtgtacgattacaacgaggctaacaaggtgaagaagttgttcgatctttctactaaggtggagcttgatcacattaagcagaacacttcaggatacactttgtcttacattattttcaacaaagagtctactaagttgaagttctcttgcacttgttcttctaactactcaaactacactattaggattactttcgatccaaactacattattccagagccacagtctagggctattattaagtatgtggatcttcaagataagaacttcgctaagtaccttaggaagttggtcgaccatcatcatcatcatcataaggatgaactttga

SEQ ID NO: 122 - protein, 568 aa, Artificial Sequence
  source: /note="Description of Artificial Sequence: Synthetic polypeptide"
MGFVLFSQLPSFLLVSTLLLFLVISHSCRAQNGGSYPYKSGEYRTKSFFGYGYYEVRMKAAKNVGIVSSFFTYTGPSDNNPWDEIDIEFLGKDTTKVQFNWYKNGVGGNEYLHNLGFDASQDFHTYGFEWRPDYIDFYVDGKKVYRGTRNIPVTPGKIMMNLWPGIGVDEWLGRYDGRTPLQAEYEYVKYYPNGRSEFKLVVNTPFVAVFSNFDSSQWEKADWANGSVFNCVWKPSQVTFSNGKMILTLDREYVDCKYDVTTKVATCEIIDTIDSSVLKEHHTVHYSITLSRWDKLIIKYPTNEKTHFENFFVNPFNLKDKVLYNYNKPINIEHILPGAITTDIYDTRTKIKQYILRIPPYVHKDIHFSLEFNNSLSLTKQNQNIIYGNVAKIFIHINQGYKEIHGCDFTGKYSHLFTYSKKPLPNDDDICNVTIGNNTFSGFACLSHFELKPNNCFSSVYDYNEANKVKKLFDLSTKVELDHIKQNTSGYTLSYIIFNKESTKLKFSCTCSSNYSNYTIRITFDPNYIIPEPQSRAIIKYVDLQDKNFAKYLRKLVDHHHHHHKDEL

SEQ ID NO: 123 - DNA, 2241 bp, Artificial Sequence
  source: /note="Description of Artificial Sequence: Synthetic polynucleotide"
atgggatttgttctcttttcacaattgccttcatttcttcttgtctctacacttctcttattcctagtaatatcccactcttgccgtgccaacaacactaacaaagagtatgtttgcgatttcactgatcagcttaagccaactgagtctggaccaaaggttaagaagtgcgaggttaaggttaacgagccacttattaaggtgaagattatttgcccacttaagggatctgtggagaagttgtacgataacattgagtacgtgccaaagaagtctccatacgttgttcttacaaaagaagagactaagttgaaagagaagttgctttctaagttgatttacggacttcttatttctccaactgtgaacgagaaagagaacaacttcaaagagggtgttattgagttcactcttccaccagttgttcacaaggctactgtgttctacttcatttgcgataactctaagactgaggatgataacaagaagggaaacaggggtattgtggaggtttacgtggagccatacggaaacaagattaacggatgcgctttccttgatgaggatgaagaggaagagaagtacggaaaccagattgaagaggatgagcacaacgagaagattaagatgaaaactttcttcactcagaacatttacaagaagaacaacatttacccatgctacatgaagttgtactctggtgatattggaggaattcttttcccaaagaacattaagtctactacttgcttcgaagagatgattccatacaacaaagagattaagtggaacaaagagaacaagtctcttggaaacttggtgaacaactctgtggtgtataacaaagagatgaacgctaagtacttcaacgttcagtacgtgcacattccaacttcatacaaggatactcttaaccttttttgttctattattcttaaagaggaagagtctaaccttatttctacttcttaccttgtgtacgtttctattaacgaagagcttcaattctctcttttcgatttctacgagtctttcgtgcctattaagaaaactattcaggtggcacagaagaacgttaacaacaaagagcacgattacacttgcgatttcactgataagttggataagactgtgccatctactgctaacggaaagaagttgttcatctgtaggaagcaccttaaagagttcgatactttcactcttaagtgcaacgtgcaaaagactcagtacccaaacattgagattttcccaaagactcttaaggataagaaagaggtgttgaagttggatcttgatattcagtaccagatgttctctaagttcttcaagttcaacactcagaacgctaagtaccttaacctttacccttactaccttattttcccattcaaccacattggaaagaaagagcttaagaacaacccaacttacaagaaccacaaggatgtgaagtacttcgagcagagttctgtgctttctcctctttcttctgctgattctcttggaaagttgcttaacttccttgatactcaagagactgtgtgccttactgagaagattagataccttcaactttctattaacgagcttggatctgataacaacactttctctgtgactttccaggtgccaccttacattgatattaaggaaccattctacttcatgttcggatgcaacaacaacaagggagagggaaacattggaattgtggagcttttgatttctaagcaggaagagaagattaagggatgcaacttccacgagtctaagttggattacttcaacgagcagatttcttctgatactcacgagtgcactcttcatgcttacgagaacgatattattggattcaactgccttgagactactcatccaaacgaggttgaagttgaggttgaggatgctgagatttaccttcaaccagagaactgcttcaacaacgtgtacaagggacttaactctgtggatattactactattcttaagaacgctcagacttacaacattaacaacaagaaaactccaactttccttaagattccaccatacaaccttttggaggatgtggagatttcttgccagtgcactattaagcaggtggtgaaaaagatcaaagtgattattactaagaacgatactgtgcttcttaagagagaggttcagtctgagtctactcttgatgataagatttacaaggtcgaccatcatcatcatcatcataaggatgaactttga

SEQ ID NO: 124 - protein, 746 aa, Artificial Sequence
  source: /note="Description of Artificial Sequence: Synthetic polypeptide"
MGFVLFSQLPSFLLVSTLLLFLVISHSCRANNTNKEYVCDFTDQLKPTESGPKVKKCEVKVNEPLIKVKIICPLKGSVEKLYDNIEYVPKKSPYVVLTKEETKLKEKLLSKLIYGLLISPTVNEKENNFKEGVIEFTLPPVVHKATVFYFICDNSKTEDDNKKGNRGIVEVYVEPYGNKINGCAFLDEDEEEEKYGNQIEEDEHNEKIKMKTFFTQNIYKKNNIYPCYMKLYSGDIGGILFPKNIKSTTCFEEMIPYNKEIKWNKENKSLGNLVNNSVVYNKEMNAKYFNVQYVHIPTSYKDTLNLFCSIILKEEESNLISTSYLVYVSINEELQFSLFDFYESFVPIKKTIQVAQKNVNNKEHDYTCDFTDKLDKTVPSTANGKKLFICRKHLKEFDTFTLKCNVQKTQYPNIEIFPKTLKDKKEVLKLDLDIQYQMFSKFFKFNTQNAKYLNLYPYYLIFPFNHIGKKELKNNPTYKNHKDVKYFEQSSVLSPLSSADSLGKLLNFLDTQETVCLTEKIRYLQLSINELGSDNNTFSVTFQVPPYIDIKEPFYFMFGCNNNKGEGNIGIVELLISKQEEKIKGCNFHESKLDYFNEQISSDTHECTLHAYENDIIGFNCLETTHPNEVEVEVEDAEIYLQPENCFNNVYKGLNSVDITTILKNAQTYNINNKKTPTFLKIPPYNLLEDVEISCQCTIKQVVKKIKVIITKNDTVLLKREVQSESTLDDKIYKVDHHHHHHKDEL

SEQ ID NO: 125 - DNA, 2904 bp, Artificial Sequence
  source: /note="Description of Artificial Sequence: Synthetic polynucleotide"
atgggatttgttctcttttcacaattgccttcatttcttcttgtctctacacttctcttattcctagtaatatcccactcttgccgtgcccaaaatggaggttcttatccatataagtctggtgagtatagaactaagtctttctttggatatggttattatgaagttaggatgaaggctgcaaagaacgttggaattgtttcttctttctttacttatactggaccatctgataacaacccatgggatgagattgatattgagtttcttggaaaggatactactaaggttcaattcaactggtataagaatggtgttggtggaaacgagtatcttcataaccttggatttgatgcttctcaagattttcatacttatggttttgagtggagaccagattatattgatttttatgttgatggaaagaaggtttatagaggtactagaaacattccagttactcctggaaagattatgatgaatctttggccaggaattggtgttgatgaatggcttggtagatatgatggaagaactccacttcaagctgagtatgagtatgttaagtattatccaaacggtagatctaacaacactaacaaagagtatgtttgcgatttcactgatcagcttaagccaactgagtctggaccaaaggttaagaagtgcgaggttaaggttaacgagccacttattaaggtgaagattatttgcccacttaagggatctgtggagaagttgtacgataacattgagtacgtgccaaagaagtctccatacgttgttcttacaaaagaagagactaagttgaaagagaagttgctttctaagttgatttacggacttcttatttctccaactgtgaacgagaaagagaacaacttcaaagagggtgttattgagttcactcttccaccagttgttcacaaggctactgtgttctacttcatttgcgataactctaagactgaggatgataacaagaagggaaacaggggtattgtggaggtttacgtggagccatacggaaacaagattaacggatgcgctttccttgatgaggatgaagaggaagagaagtacggaaaccagattgaagaggatgagcacaacgagaagattaagatgaaaactttcttcactcagaacatttacaagaagaacaacatttacccatgctacatgaagttgtactctggtgatattggaggaattcttttcccaaagaacattaagtctactacttgcttcgaagagatgattccatacaacaaagagattaagtggaacaaagagaacaagtctcttggaaacttggtgaacaactctgtggtgtataacaaagagatgaacgctaagtacttcaacgttcagtacgtgcacattccaacttcatacaaggatactcttaaccttttttgttctattattcttaaagaggaagagtctaaccttatttctacttcttaccttgtgtacgtttctattaacgaagagcttcaattctctcttttcgatttctacgagtctttcgtgcctattaagaaaactattcaggtggcacagaagaacgttaacaacaaagagcacgattacacttgcgatttcactgataagttggataagactgtgccatctactgctaacggaaagaagttgttcatctgtaggaagcaccttaaagagttcgatactttcactcttaagtgcaacgtgcaaaagactcagtacccaaacattgagattttcccaaagactcttaaggataagaaagaggtgttgaagttggatcttgatattcagtaccagatgttctctaagttcttcaagttcaacactcagaacgctaagtaccttaacctttacccttactaccttattttcccattcaaccacattggaaagaaagagcttaagaacaacccaacttacaagaaccacaaggatgtgaagtacttcgagcagagttctgtgctttctcctctttcttctgctgattctcttggaaagttgcttaacttccttgatactcaagagactgtgtgccttactgagaagattagataccttcaactttctattaacgagcttggatctgataacaacactttctctgtgactttccaggtgccaccttacattgatattaaggaaccattctacttcatgttcggatgcaacaacaacaagggagagggaaacattggaattgtggagcttttgatttctaagcaggaagagaagattaagggatgcaacttccacgagtctaagttggattacttcaacgagcagatttcttctgatactcacgagtgcactcttcatgcttacgagaacgatattattggattcaactgccttgagactactcatccaaacgaggttgaagttgaggttgaggatgctgagatttaccttcaaccagagaactgcttcaacaacgtgtacaagggacttaactctgtggatattactactattcttaagaacgctcagacttacaacattaacaacaagaaaactccaactttccttaagattccaccatacaaccttttggaggatgtggagatttcttgccagtgcactattaagcaggtggtgaaaaagatcaaagtgattattactaagaacgatactgtgcttcttaagagagaggttcagtctgagtctactcttgatgataagatttacaagaagcttgttgttaatactccatttgttgctgttttctctaactttgattcttctcaatgggaaaaggctgattgggctaacggttctgtttttaactgtgtttggaagccatctcaagttactttttctaacggaaagatgattcttactttggatagagagtatgtcgaccatcatcatcatcatcataaggatgaactttga

SEQ ID NO: 126 - protein, 967 aa, Artificial Sequence
  source: /note="Description of Artificial Sequence: Synthetic polypeptide"
MGFVLFSQLPSFLLVSTLLLFLVISHSCRAQNGGSYPYKSGEYRTKSFFGYGYYEVRMKAAKNVGIVSSFFTYTGPSDNNPWDEIDIEFLGKDTTKVQFNWYKNGVGGNEYLHNLGFDASQDFHTYGFEWRPDYIDFYVDGKKVYRGTRNIPVTPGKIMMNLWPGIGVDEWLGRYDGRTPLQAEYEYVKYYPNGRSNNTNKEYVCDFTDQLKPTESGPKVKKCEVKVNEPLIKVKIICPLKGSVEKLYDNIEYVPKKSPYVVLTKEETKLKEKLLSKLIYGLLISPTVNEKENNFKEGVIEFTLPPVVHKATVFYFICDNSKTEDDNKKGNRGIVEVYVEPYGNKINGCAFLDEDEEEEKYGNQIEEDEHNEKIKMKTFFTQNIYKKNNIYPCYMKLYSGDIGGILFPKNIKSTTCFEEMIPYNKEIKWNKENKSLGNLVNNSVVYNKEMNAKYFNVQYVHIPTSYKDTLNLFCSIILKEEESNLISTSYLVYVSINEELQFSLFDFYESFVPIKKTIQVAQKNVNNKEHDYTCDFTDKLDKTVPSTANGKKLFICRKHLKEFDTFTLKCNVQKTQYPNIEIFPKTLKDKKEVLKLDLDIQYQMFSKFFKFNTQNAKYLNLYPYYLIFPFNHIGKKELKNNPTYKNHKDVKYFEQSSVLSPLSSADSLGKLLNFLDTQETVCLTEKIRYLQLSINELGSDNNTFSVTFQVPPYIDIKEPFYFMFGCNNNKGEGNIGIVELLISKQEEKIKGCNFHESKLDYFNEQISSDTHECTLHAYENDIIGFNCLETTHPNEVEVEVEDAEIYLQPENCFNNVYKGLNSVDITTILKNAQTYNINNKKTPTFLKIPPYNLLEDVEISCQCTIKQVVKKIKVIITKNDTVLLKREVQSESTLDDKIYKKLVVNTPFVAVFSNFDSSQWEKADWANGSVFNCVWKPSQVTFSNGKMILTLDREYVDHHHHHHKDEL

SEQ ID NO: 127 - DNA, 2196 bp, Artificial Sequence
  source: /note="Description of Artificial Sequence: Synthetic polynucleotide"
atgggatttgttctcttttcacaattgccttcatttcttcttgtctctacacttctcttattcctagtaatatcccactcttgccgtgcctacgttgatgagaaagaaaggcagggagagatatacccattcggagatgaagaggagaaagatgaaggtggagagtctttcacttacgagaagtctgaagtggacaaaacagatttgttcaagttcattgagggtggagagggtgatgatgtgtacaaagtggatggatctaaggtgttgcttgatgatgatacaatttctagggtgtcaaagaagcacactgctagggacggtgaatatggtgagtacggtgaagctgttgaggatggtgaaaacgtgattaagattattaggtctgtgcttcagtctggtgctttgccatctgttggagtggatgagcttgataagattgatttgtcttacgagactactgagtctggtgatactgctgtgtctgaggattcttacgataagtacgcttctaacaacactaacaaagagtatgtttgcgatttcactgatcagcttaagccaactgagtctggaccaaaggttaagaagtgcgaggttaaggttaacgagccacttattaaggtgaagattatttgcccacttaagggatctgtggagaagttgtacgataacattgagtacgtgccaaagaagtctccatacgttgttcttacaaaagaagagactaagttgaaagagaagttgctttctaagttgatttacggacttcttatttctccaactgtgaacgagaaagagaacaacttcaaagagggtgttattgagttcactcttccaccagttgttcacaaggctactgtgttctacttcatttgcgataactctaagactgaggatgataacaagaagggaaacaggggtattgtggaggtttacgtggagccatacggaaacaagattaacggatgcgctttccttgatgaggatgaagaggaagagaagtacggaaaccagattgaagaggatgagcacaacgagaagattaagatgaaaactttcttcactcagaacatttacaagaagaacaacatttacccatgctacatgaagttgtactctggtgatattggaggaattcttttcccaaagaacattaagtctactacttgcttcgaagagatgattccatacaacaaagagattaagtggaacaaagagaacaagtctcttggaaacttggtgaacaactctgtggtgtataacaaagagatgaacgctaagtacttcaacgttcagtacgtgcacattccaacttcatacaaggatactcttaaccttttttgttctattattcttaaagaggaagagtctaaccttatttctacttcttaccttgtgtacgtttctattaacgaagagcttcaattctctcttttcgatttctacgagtctttcgtgcctattaagaaaactattcaggtggcacagaagaacgttaacaacaaagagcacgattacacttgcgatttcactgataagttggataagactgtgccatctactgctaacggaaagaagttgttcatctgtaggaagcaccttaaagagttcgatactttcactcttaagtgcaacgtgcaaaagactcagtacccaaacattgagattttcccaaagactcttaaggataagaaagaggtgttgaagttggatcttgatattcagtaccagatgttctctaagttcttcaagttcaacactcagaacgctaagtaccttaacctttacccttactaccttattttcccattcaaccacattggaaagaaagagcttaagaacaacccaacttacaagaaccacaaggatgtgaagtacttcgagcagagttctgtgctttctcctctttcttctgctgattctcttggaaagttgcttaacttccttgatactcaagagactgtgtgccttactgagaagattagataccttcaactttctattaacgagcttggatctgataacaacactttctctgtgactttccaggtgccaccttacattgatattaaggaaccattctacttcatgttcggatgcaacaacaacaagggagagggaaacattggaattgtggagcttttgatttctaaggtcgaccatcatcatcatcatcataaggatgaactttga

SEQ ID NO: 128 - protein, 731 aa, Artificial Sequence
  source: /note="Description of Artificial Sequence: Synthetic polypeptide"
MGFVLFSQLPSFLLVSTLLLFLVISHSCRAYVDEKERQGEIYPFGDEEEKDEGGESFTYEKSEVDKTDLFKFIEGGEGDDVYKVDGSKVLLDDDTISRVSKKHTARDGEYGEYGEAVEDGENVIKIIRSVLQSGALPSVGVDELDKIDLSYETTESGDTAVSEDSYDKYASNNTNKEYVCDFTDQLKPTESGPKVKKCEVKVNEPLIKVKIICPLKGSVEKLYDNIEYVPKKSPYVVLTKEETKLKEKLLSKLIYGLLISPTVNEKENNFKEGVIEFTLPPVVHKATVFYFICDNSKTEDDNKKGNRGIVEVYVEPYGNKINGCAFLDEDEEEEKYGNQIEEDEHNEKIKMKTFFTQNIYKKNNIYPCYMKLYSGDIGGILFPKNIKSTTCFEEMIPYNKEIKWNKENKSLGNLVNNSVVYNKEMNAKYFNVQYVHIPTSYKDTLNLFCSIILKEEESNLISTSYLVYVSINEELQFSLFDFYESFVPIKKTIQVAQKNVNNKEHDYTCDFTDKLDKTVPSTANGKKLFICRKHLKEFDTFTLKCNVQKTQYPNIEIFPKTLKDKKEVLKLDLDIQYQMFSKFFKFNTQNAKYLNLYPYYLIFPFNHIGKKELKNNPTYKNHKDVKYFEQSSVLSPLSSADSLGKLLNFLDTQETVCLTEKIRYLQLSINELGSDNNTFSVTFQVPPYIDIKEPFYFMFGCNNNKGEGNIGIVELLISKVDHHHHHHKDEL

SEQ ID NO: 129 - DNA, 1458 bp, Artificial Sequence
  source: /note="Description of Artificial Sequence: Synthetic polynucleotide"
atgggatttgttctcttttcacaattgccttcatttcttcttgtctctacacttctcttattcctagtaatatcccactcttgccgtgcctacgttgatgagaaagaaaggcagggagagatatacccattcggagatgaagaggagaaagatgaaggtggagagtctttcacttacgagaagtctgaagtggacaaaacagatttgttcaagttcattgagggtggagagggtgatgatgtgtacaaagtggatggatctaaggtgttgcttgatgatgatacaatttctagggtgtcaaagaagcacactgctagggacggtgaatatggtgagtacggtgaagctgttgaggatggtgaaaacgtgattaagattattaggtctgtgcttcagtctggtgctttgccatctgttggagtggatgagcttgataagattgatttgtcttacgagactactgagtctggtgatactgctgtgtctgaggattcttacgataagtacgcttctaacaacactaacaaagagtatgtttgcgatttcactgatcagcttaagccaactgagtctggaccaaaggttaagaagtgcgaggttaaggttaacgagccacttattaaggtgaagattatttgcccacttaagggatctgtggagaagttgtacgataacattgagtacgtgccaaagaagtctccatacgttgttcttacaaaagaagagactaagttgaaagagaagttgctttctaagttgatttacggacttcttatttctccaactgtgaacgagaaagagaacaacttcaaagagggtgttattgagttcactcttccaccagttgttcacaaggctactgtgttctacttcatttgcgataactctaagactgaggatgataacaagaagggaaacaggggtattgtggaggtttacgtggagccatacggaaacaagattaacggatgcgctttccttgatgaggatgaagaggaagagaagtacggaaaccagattgaagaggatgagcacaacgagaagattaagatgaaaactttcttcactcagaacatttacaagaagaacaacatttacccatgctacatgaagttgtactctggtgatattggaggaattcttttcccaaagaacattaagtctactacttgcttcgaagagatgattccatacaacaaagagattaagtggaacaaagagaacaagtctcttggaaacttggtgaacaactctgtggtgtataacaaagagatgaacgctaagtacttcaacgttcagtacgtgcacattccaacttcatacaaggatactcttaaccttttttgttctattattcttaaagaggaagagtctaaccttatttctacttcttaccttgtgtacgtttctattaacgaagtcgaccatcatcatcatcatcataaggatgaactttga

SEQ ID NO: 130 - protein, 485 aa, Artificial Sequence
  source: /note="Description of Artificial Sequence: Synthetic polypeptide"
MGFVLFSQLPSFLLVSTLLLFLVISHSCRAYVDEKERQGEIYPFGDEEEKDEGGESFTYEKSEVDKTDLFKFIEGGEGDDVYKVDGSKVLLDDDTISRVSKKHTARDGEYGEYGEAVEDGENVIKIIRSVLQSGALPSVGVDELDKIDLSYETTESGDTAVSEDSYDKYASNNTNKEYVCDFTDQLKPTESGPKVKKCEVKVNEPLIKVKIICPLKGSVEKLYDNIEYVPKKSPYVVLTKEETKLKEKLLSKLIYGLLISPTVNEKENNFKEGVIEFTLPPVVHKATVFYFICDNSKTEDDNKKGNRGIVEVYVEPYGNKINGCAFLDEDEEEEKYGNQIEEDEHNEKIKMKTFFTQNIYKKNNIYPCYMKLYSGDIGGILFPKNIKSTTCFEEMIPYNKEIKWNKENKSLGNLVNNSVVYNKEMNAKYFNVQYVHIPTSYKDTLNLFCSIILKEEESNLISTSYLVYVSINEVDHHHHHHKDEL

SEQ ID NO: 131 - DNA, 990 bp, Artificial Sequence
  source: /note="Description of Artificial Sequence: Synthetic polynucleotide"
atgggatttgttctcttttcacaattgccttcatttcttcttgtctctacacttctcttattcctagtaatatcccactcttgccgtgcctacgttgatgagaaagaaaggcagggagagatatacccattcggagatgaagaggagaaagatgaaggtggagagtctttcacttacgagaagtctgaagtggacaaaacagatttgttcaagttcattgagggtggagagggtgatgatgtgtacaaagtggatggatctaaggtgttgcttgatgatgatacaatttctagggtgtcaaagaagcacactgctagggacggtgaatatggtgagtacggtgaagctgttgaggatggtgaaaacgtgattaagattattaggtctgtgcttcagtctggtgctttgccatctgttggagtggatgagcttgataagattgatttgtcttacgagactactgagtctggtgatactgctgtgtctgaggattcttacgataagtacgcttctaacaacactaacaaagagtatgtttgcgatttcactgatcagcttaagccaactgagtctggaccaaaggttaagaagtgcgaggttaaggttaacgagccacttattaaggtgaagattatttgcccacttaagggatctgtggagaagttgtacgataacattgagtacgtgccaaagaagtctccatacgttgttcttacaaaagaagagactaagttgaaagagaagttgctttctaagttgatttacggacttcttatttctccaactgtgaacgagaaagagaacaacttcaaagagggtgttattgagttcactcttccaccagttgttcacaaggctactgtgttctacttcatttgcgataactctaagactgaggatgataacaagaagggaaacaggggtattgtggaggtttacgtggagccatacgtcgaccatcatcatcatcatcataaggatgaactttga

SEQ ID NO: 132 - protein, 329 aa, Artificial Sequence
  source: /note="Description of Artificial Sequence: Synthetic polypeptide"
MGFVLFSQLPSFLLVSTLLLFLVISHSCRAYVDEKERQGEIYPFGDEEEKDEGGESFTYEKSEVDKTDLFKFIEGGEGDDVYKVDGSKVLLDDDTISRVSKKHTARDGEYGEYGEAVEDGENVIKIIRSVLQSGALPSVGVDELDKIDLSYETTESGDTAVSEDSYDKYASNNTNKEYVCDFTDQLKPTESGPKVKKCEVKVNEPLIKVKIICPLKGSVEKLYDNIEYVPKKSPYVVLTKEETKLKEKLLSKLIYGLLISPTVNEKENNFKEGVIEFTLPPVVHKATVFYFICDNSKTEDDNKKGNRGIVEVYVEPYVDHHHHHHKDEL

SEQ ID NO: 133 - DNA, 567 bp, Artificial Sequence
  source: /note="Description of Artificial Sequence: Synthetic polynucleotide"
atgggatttgttctcttttcacaattgccttcatttcttcttgtctctacacttctcttattcctagtaatatcccactcttgccgtgccaacaacactaacaaagagtatgtttgcgatttcactgatcagcttaagccaactgagtctggaccaaaggttaagaagtgcgaggttaaggttaacgagccacttattaaggtgaagattatttgcccacttaagggatctgtggagaagttgtacgataacattgagtacgtgccaaagaagtctccatacgttgttcttacaaaagaagagactaagttgaaagagaagttgctttctaagttgatttacggacttcttatttctccaactgtgaacgagaaagagaacaacttcaaagagggtgttattgagttcactcttccaccagttgttcacaaggctactgtgttctacttcatttgcgataactctaagactgaggatgataacaagaagggaaacaggggtattgtggaggtttacgtggagccatacgtcgaccatcatcatcatcatcataaggatgaactttga

SEQ ID NO: 134 - protein, 188 aa, Artificial Sequence
  source: /note="Description of Artificial Sequence: Synthetic polypeptide"
MGFVLFSQLPSFLLVSTLLLFLVISHSCRANNTNKEYVCDFTDQLKPTESGPKVKKCEVKVNEPLIKVKIICPLKGSVEKLYDNIEYVPKKSPYVVLTKEETKLKEKLLSKLIYGLLISPTVNEKENNFKEGVIEFTLPPVVHKATVFYFICDNSKTEDDNKKGNRGIVEVYVEPYVDHHHHHHKDEL

SEQ ID NO: 135 - DNA, 1230 bp, Artificial Sequence
  source: /note="Description of Artificial Sequence: Synthetic polynucleotide"
atgggatttgttctcttttcacaattgccttcatttcttcttgtctctacacttctcttattcctagtaatatcccactcttgccgtgcccaaaatggaggttcttatccatataagtctggtgagtatagaactaagtctttctttggatatggttattatgaagttaggatgaaggctgcaaagaacgttggaattgtttcttctttctttacttatactggaccatctgataacaacccatgggatgagattgatattgagtttcttggaaaggatactactaaggttcaattcaactggtataagaatggtgttggtggaaacgagtatcttcataaccttggatttgatgcttctcaagattttcatacttatggttttgagtggagaccagattatattgatttttatgttgatggaaagaaggtttatagaggtactagaaacattccagttactcctggaaagattatgatgaatctttggccaggaattggtgttgatgaatggcttggtagatatgatggaagaactccacttcaagctgagtatgagtatgttaagtattatccaaacggtagatctaacaacactaacaaagagtatgtttgcgatttcactgatcagcttaagccaactgagtctggaccaaaggttaagaagtgcgaggttaaggttaacgagccacttattaaggtgaagattatttgcccacttaagggatctgtggagaagttgtacgataacattgagtacgtgccaaagaagtctccatacgttgttcttacaaaagaagagactaagttgaaagagaagttgctttctaagttgatttacggacttcttatttctccaactgtgaacgagaaagagaacaacttcaaagagggtgttattgagttcactcttccaccagttgttcacaaggctactgtgttctacttcatttgcgataactctaagactgaggatgataacaagaagggaaacaggggtattgtggaggtttacgtggagccatacaagcttgttgttaatactccatttgttgctgttttctctaactttgattcttctcaatgggaaaaggctgattgggctaacggttctgtttttaactgtgtttggaagccatctcaagttactttttctaacggaaagatgattcttactttggatagagagtatgtcgaccatcatcatcatcatcataaggatgaactttga

SEQ ID NO: 136 - protein, 409 aa, Artificial Sequence
  source: /note="Description of Artificial Sequence: Synthetic polypeptide"
MGFVLFSQLPSFLLVSTLLLFLVISHSCRAQNGGSYPYKSGEYRTKSFFGYGYYEVRMKAAKNVGIVSSFFTYTGPSDNNPWDEIDIEFLGKDTTKVQFNWYKNGVGGNEYLHNLGFDASQDFHTYGFEWRPDYIDFYVDGKKVYRGTRNIPVTPGKIMMNLWPGIGVDEWLGRYDGRTPLQAEYEYVKYYPNGRSNNTNKEYVCDFTDQLKPTESGPKVKKCEVKVNEPLIKVKIICPLKGSVEKLYDNIEYVPKKSPYVVLTKEETKLKEKLLSKLIYGLLISPTVNEKENNFKEGVIEFTLPPVVHKATVFYFICDNSKTEDDNKKGNRGIVEVYVEPYKLVVNTPFVAVFSNFDSSQWEKADWANGSVFNCVWKPSQVTFSNGKMILTLDREYVDHHHHHHKDEL

SEQ ID NO: 137 - DNA, 1242 bp, Artificial Sequence
  source: /note="Description of Artificial Sequence: Synthetic polynucleotide"
atgggatttgttctcttttcacaattgccttcatttcttcttgtctctacacttctcttattcctagtaatatcccactcttgccgtgcccaaaatggaggttcttatccatataagtctggtgagtatagaactaagtctttctttggatatggttattatgaagttaggatgaaggctgcaaagaacgttggaattgtttcttctttctttacttatactggaccatctgataacaacccatgggatgagattgatattgagtttcttggaaaggatactactaaggttcaattcaactggtataagaatggtgttggtggaaacgagtatcttcataaccttggatttgatgcttctcaagattttcatacttatggttttgagtggagaccagattatattgatttttatgttgatggaaagaaggtttatagaggtactagaaacattccagttactcctggaaagattatgatgaatctttggccaggaattggtgttgatgaatggcttggtagatatgatggaagaactccacttcaagctgagtatgagtatgttaagtattatccaaacggtagatctgaattcaagcttgttgttaatactccatttgttgctgttttctctaactttgattcttctcaatgggaaaaggctgattgggctaacggttctgtttttaactgtgtttggaagccatctcaagttactttttctaacggaaagatgattcttactttggatagagagtatgtcgacaacaacactaacaaagagtatgtttgcgatttcactgatcagcttaagccaactgagtctggaccaaaggttaagaagtgcgaggttaaggttaacgagccacttattaaggtgaagattatttgcccacttaagggatctgtggagaagttgtacgataacattgagtacgtgccaaagaagtctccatacgttgttcttacaaaagaagagactaagttgaaagagaagttgctttctaagttgatttacggacttcttatttctccaactgtgaacgagaaagagaacaacttcaaagagggtgttattgagttcactcttccaccagttgttcacaaggctactgtgttctacttcatttgcgataactctaagactgaggatgataacaagaagggaaacaggggtattgtggaggtttacgtggagccatacgtcgaccatcatcatcatcatcataaggatgaactttga

SEQ ID NO: 138 - protein, 413 aa, Artificial Sequence
  source: /note="Description of Artificial Sequence: Synthetic polypeptide"
MGFVLFSQLPSFLLVSTLLLFLVISHSCRAQNGGSYPYKSGEYRTKSFFGYGYYEVRMKAAKNVGIVSSFFTYTGPSDNNPWDEIDIEFLGKDTTKVQFNWYKNGVGGNEYLHNLGFDASQDFHTYGFEWRPDYIDFYVDGKKVYRGTRNIPVTPGKIMMNLWPGIGVDEWLGRYDGRTPLQAEYEYVKYYPNGRSEFKLVVNTPFVAVFSNFDSSQWEKADWANGSVFNCVWKPSQVTFSNGKMILTLDREYVDNNTNKEYVCDFTDQLKPTESGPKVKKCEVKVNEPLIKVKIICPLKGSVEKLYDNIEYVPKKSPYVVLTKEETKLKEKLLSKLIYGLLISPTVNEKENNFKEGVIEFTLPPVVHKATVFYFICDNSKTEDDNKKGNRGIVEVYVEPYVDHHHHHHKDEL

SEQ ID NO: 139 - DNA, 1848 bp, Artificial Sequence
  source: /note="Description of Artificial Sequence: Synthetic polynucleotide"
ggatccttaattaaaatgggatttgttctcttttcacaattgccttcatttcttcttgtctctacacttctcttattcctagtaatatcccactcttgccgtgcccaaaatggaggttcttatccatataagtctggtgagtatagaactaagtctttctttggatatggttattatgaagttaggatgaaggctgcaaagaacgttggaattgtttcttctttctttacttatactggaccatctgataacaacccatgggatgagattgatattgagtttcttggaaaggatactactaaggttcaattcaactggtataagaatggtgttggtggaaacgagtatcttcataaccttggatttgatgcttctcaagattttcatacttatggttttgagtggagaccagattatattgatttttatgttgatggaaagaaggtttatagaggtactagaaacattccagttactcctggaaagattatgatgaatctttggccaggaattggtgttgatgaatggcttggtagatatgatggaagaactccacttcaagctgagtatgagtatgttaagtattatccaaacggtagatctaaggtgacagttgatactgtgtgcaagaggggtttccttattcagatgtctggacaccttgagtgtaagtgcgagaacgatcttgttcttgtgaacgaagagacttgcgaagagaaggtgttgaagtgcgatgagaaaactgtgaacaagccatgcggagatttctctaagtgcattaagattgatggaaacccagtgtcttatgcttgcaagtgcaaccttggatacgatatggtgaacaatgtgtgcattccaaacgagtgcaagcaagtgacttgcggaaacggaaagtgcattcttgatacttctaacccagttaagactgctgtgtgtagttgcaacattggaaaggtgccaaacgttcaggatcagaacaagtgctctaaggatggtgaaactaagtgctctcttaagtgccttaaagagaacgagacttgcaaggctgtggatggtatttacaagtgcgattgcaaggatggattcattattgatcaagagtcatctatctgcactaagcttgttgttaatactccatttgttgctgttttctctaactttgattcttctcaatgggaaaaggctgattgggctaacggttctgtttttaactgtgtttggaagccatctcaagttactttttctaacggaaagatgattcttactttggatagagagtatgtcgacaaggtgacagttgatactgtgtgcaagaggggtttccttattcagatgtctggacaccttgagtgtaagtgcgagaacgatcttgttcttgtgaacgaagagacttgcgaagagaaggtgttgaagtgcgatgagaaaactgtgaacaagccatgcggagatttctctaagtgcattaagattgatggaaacccagtgtcttatgcttgcaagtgcaaccttggatacgatatggtgaacaatgtgtgcattccaaacgagtgcaagcaagtgacttgcggaaacggaaagtgcattcttgatacttctaacccagttaagactgctgtgtgtagttgcaacattggaaaggtgccaaacgttcaggatcagaacaagtgctctaaggatggtgaaactaagtgctctcttaagtgccttaaagagaacgagacttgcaaggctgtggatggtatttacaagtgcgattgcaaggatggattcattattgatcaagagtcatctatctgcactgtcgaccatcatcatcatcatcataaggatgaactttgactcgagctc

SEQ ID NO: 140 - protein, 607 aa, Artificial Sequence
  source: /note="Description of Artificial Sequence: Synthetic polypeptide"
MGFVLFSQLPSFLLVSTLLLFLVISHSCRAQNGGSYPYKSGEYRTKSFFGYGYYEVRMKAAKNVGIVSSFFTYTGPSDNNPWDEIDIEFLGKDTTKVQFNWYKNGVGGNEYLHNLGFDASQDFHTYGFEWRPDYIDFYVDGKKVYRGTRNIPVTPGKIMMNLWPGIGVDEWLGRYDGRTPLQAEYEYVKYYPNGRSKVTVDTVCKRGFLIQMSGHLECKCENDLVLVNEETCEEKVLKCDEKTVNKPCGDFSKCIKIDGNPVSYACKCNLGYDMVNNVCIPNECKQVTCGNGKCILDTSNPVKTAVCSCNIGKVPNVQDQNKCSKDGETKCSLKCLKENETCKAVDGIYKCDCKDGFIIDQESSICTKLVVNTPFVAVFSNFDSSQWEKADWANGSVFNCVWKPSQVTFSNGKMILTLDREYVDKVTVDTVCKRGFLIQMSGHLECKCENDLVLVNEETCEEKVLKCDEKTVNKPCGDFSKCIKIDGNPVSYACKCNLGYDMVNNVCIPNECKQVTCGNGKCILDTSNPVKTAVCSCNIGKVPNVQDQNKCSKDGETKCSLKCLKENETCKAVDGIYKCDCKDGFIIDQESSICTVDHHHHHHKDEL

SEQ ID NO: 141 - DNA, 1848 bp, Artificial Sequence; identical to SEQ ID NO: 139
  source: /note="Description of Artificial Sequence: Synthetic polynucleotide"

SEQ ID NO: 142 - protein, 607 aa, Artificial Sequence; identical to SEQ ID NO: 140
  source: /note="Description of Artificial Sequence: Synthetic polypeptide"

SEQ ID NO: 143 - DNA, 1860 bp, Artificial Sequence
  source: /note="Description of Artificial Sequence: Synthetic polynucleotide"
ggatccttaattaaaatgggatttgttctcttttcacaattgccttcatttcttcttgtctctacacttctcttattcctagtaatatcccactcttgccgtgcccaaaatggaggttcttatccatataagtctggtgagtatagaactaagtctttctttggatatggttattatgaagttaggatgaaggctgcaaagaacgttggaattgtttcttctttctttacttatactggaccatctgataacaacccatgggatgagattgatattgagtttcttggaaaggatactactaaggttcaattcaactggtataagaatggtgttggtggaaacgagtatcttcataaccttggatttgatgcttctcaagattttcatacttatggttttgagtggagaccagattatattgatttttatgttgatggaaagaaggtttatagaggtactagaaacattccagttactcctggaaagattatgatgaatctttggccaggaattggtgttgatgaatggcttggtagatatgatggaagaactccacttcaagctgagtatgagtatgttaagtattatccaaacggtagatctagagttactgagaacactatctgcaagtacggataccttattcagatgtctaaccactacgagtgcaagtgtattgagggatacgtgcttattaacgaggatacttgcggaaagaaagttgtgtgcgataaggtggagaactctttcaaggcttgcgatgagtacgcttactgcttcgatcttggaaacaagaacaacgagaagcagattaagtgcatgtgcaggactgagtacactcttactgctggtgtttgcgttccaaatgtgtgcagggataaagtttgcggaaagggaaagtgcattgtggacccagctaactctcttactcacacttgctcttgcaacattggaactattcttaaccagaacaagttgtgcgatattcagggtgatactccatgctctcttaagtgcgctgagaacgaagtgtgtactcttgagggaaactactacacttgcaaagaagatccatcttctaacggtggaggaaacactgttgatcaggctgatacttcttactctgtgaagcttgttgttaatactccatttgttgctgttttctctaactttgattcttctcaatgggaaaaggctgattgggctaacggttctgtttttaactgtgtttggaagccatctcaagttactttttctaacggaaagatgattcttactttggatagagagtatgtcgacaaggtgacagttgatactgtgtgcaagaggggtttccttattcagatgtctggacaccttgagtgtaagtgcgagaacgatcttgttcttgtgaacgaagagacttgcgaagagaaggtgttgaagtgcgatgagaaaactgtgaacaagccatgcggagatttctctaagtgcattaagattgatggaaacccagtgtcttatgcttgcaagtgcaaccttggatacgatatggtgaacaatgtgtgcattccaaacgagtgcaagcaagtgacttgcggaaacggaaagtgcattcttgatacttctaacccagttaagactgctgtgtgtagttgcaacattggaaaggtgccaaacgttcaggatcagaacaagtgctctaaggatggtgaaactaagtgctctcttaagtgccttaaagagaacgagacttgcaaggctgtggatggtatttacaagtgcgattgcaaggatggattcattattgatcaagagtcatctatctgcactgtcgaccatcatcatcatcatcataaggatgaactttgactcgagctc

SEQ ID NO: 144 - protein, 611 aa, Artificial Sequence
  source: /note="Description of Artificial Sequence: Synthetic polypeptide"
MGFVLFSQLPSFLLVSTLLLFLVISHSCRAQNGGSYPYKSGEYRTKSFFGYGYYEVRMKAAKNVGIVSSFFTYTGPSDNNPWDEIDIEFLGKDTTKVQFNWYKNGVGGNEYLHNLGFDASQDFHTYGFEWRPDYIDFYVDGKKVYRGTRNIPVTPGKIMMNLWPGIGVDEWLGRYDGRTPLQAEYEYVKYYPNGRSRVTENTICKYGYLIQMSNHYECKCIEGYVLINEDTCGKKVVCDKVENSFKACDEYAYCFDLGNKNNEKQIKCMCRTEYTLTAGVCVPNVCRDKVCGKGKCIVDPANSLTHTCSCNIGTILNQNKLCDIQGDTPCSLKCAENEVCTLEGNYYTCKEDPSSNGGGNTVDQADTSYSVKLVVNTPFVAVFSNFDSSQWEKADWANGSVFNCVWKPSQVTFSNGKMILTLDREYVDKVTVDTVCKRGFLIQMSGHLECKCENDLVLVNEETCEEKVLKCDEKTVNKPCGDFSKCIKIDGNPVSYACKCNLGYDMVNNVCIPNECKQVTCGNGKCILDTSNPVKTAVCSCNIGKVPNVQDQNKCSKDGETKCSLKCLKENETCKAVDGIYKCDCKDGFIIDQESSICTVDHHHHHHKDEL

SEQ ID NO: 145 - DNA, 1860 bp, Artificial Sequence; identical to SEQ ID NO: 143
  source: /note="Description of Artificial Sequence: Synthetic polynucleotide"

SEQ ID NO: 146 - protein, 611 aa, Artificial Sequence; identical to SEQ ID NO: 144
  source: /note="Description of Artificial Sequence: Synthetic polypeptide"

SEQ ID NO: 147 - DNA, 1872 bp, Artificial Sequence
  source: /note="Description of Artificial Sequence: Synthetic polynucleotide"
ggatccttaattaaaatgggatttgttctcttttcacaattgccttcatttcttcttgtctctacacttctcttattcctagtaatatcccactcttgccgtgcccaaaatggaggttcttatccatataagtctggtgagtatagaactaagtctttctttggatatggttattatgaagttaggatgaaggctgcaaagaacgttggaattgtttcttctttctttacttatactggaccatctgataacaacccatgggatgagattgatattgagtttcttggaaaggatactactaaggttcaattcaactggtataagaatggtgttggtggaaacgagtatcttcataaccttggatttgatgcttctcaagattttcatacttatggttttgagtggagaccagattatattgatttttatgttgatggaaagaaggtttatagaggtactagaaacattccagttactcctggaaagattatgatgaatctttggccaggaattggtgttgatgaatggcttggtagatatgatggaagaactccacttcaagctgagtatgagtatgttaagtattatccaaacggtagatctagagttactgagaacactatctgcaagtacggataccttattcagatgtctaaccactacgagtgcaagtgtattgagggatacgtgcttattaacgaggatacttgcggaaagaaagttgtgtgcgataaggtggagaactctttcaaggcttgcgatgagtacgcttactgcttcgatcttggaaacaagaacaacgagaagcagattaagtgcatgtgcaggactgagtacactcttactgctggtgtttgcgttccaaatgtgtgcagggataaagtttgcggaaagggaaagtgcattgtggacccagctaactctcttactcacacttgctcttgcaacattggaactattcttaaccagaacaagttgtgcgatattcagggtgatactccatgctctcttaagtgcgctgagaacgaagtgtgtactcttgagggaaactactacacttgcaaagaagatccatcttctaacggtggaggaaacactgttgatcaggctgatacttcttactctgtgaagcttgttgttaatactccatttgttgctgttttctctaactttgattcttctcaatgggaaaaggctgattgggctaacggttctgtttttaactgtgtttggaagccatctcaagttactttttctaacggaaagatgattcttactttggatagagagtatgtcgacagagttactgagaacactatctgcaagtacggataccttattcagatgtctaaccactacgagtgcaagtgtattgagggatacgtgcttattaacgaggatacttgcggaaagaaagttgtgtgcgataaggtggagaactctttcaaggcttgcgatgagtacgcttactgcttcgatcttggaaacaagaacaacgagaagcagattaagtgcatgtgcaggactgagtacactcttactgctggtgtttgcgttccaaatgtgtgcagggataaagtttgcggaaagggaaagtgcattgtggacccagctaactctcttactcacacttgctcttgcaacattggaactattcttaaccagaacaagttgtgcgatattcagggtgatactccatgctctcttaagtgcgctgagaacgaagtgtgtactcttgagggaaactactacacttgcaaagaagatccatcttctaacggtggaggaaacactgttgatcaggctgatacttcttactctgtggtcgaccatcatcatcatcatcataaggatgaactttgactcgagctc

SEQ ID NO: 148 - protein, 615 aa, Artificial Sequence
  source: /note="Description of Artificial Sequence: Synthetic polypeptide"
MGFVLFSQLPSFLLVSTLLLFLVISHSCRAQNGGSYPYKSGEYRTKSFFGYGYYEVRMKAAKNVGIVSSFFTYTGPSDNNPWDEIDIEFLGKDTTKVQFNWYKNGVGGNEYLHNLGFDASQDFHTYGFEWRPDYIDFYVDGKKVYRGTRNIPVTPGKIMMNLWPGIGVDEWLGRYDGRTPLQAEYEYVKYYPNGRSRVTENTICKYGYLIQMSNHYECKCIEGYVLINEDTCGKKVVCDKVENSFKACDEYAYCFDLGNKNNEKQIKCMCRTEYTLTAGVCVPNVCRDKVCGKGKCIVDPANSLTHTCSCNIGTILNQNKLCDIQGDTPCSLKCAENEVCTLEGNYYTCKEDPSSNGGGNTVDQADTSYSVKLVVNTPFVAVFSNFDSSQWEKADWANGSVFNCVWKPSQVTFSNGKMILTLDREYVDRVTENTICKYGYLIQMSNHYECKCIEGYVLINEDTCGKKVVCDKVENSFKACDEYAYCFDLGNKNNEKQIKCMCRTEYTLTAGVCVPNVCRDKVCGKGKCIVDPANSLTHTCSCNIGTILNQNKLCDIQGDTPCSLKCAENEVCTLEGNYYTCKEDPSSNGGGNTVDQADTSYSVVDHHHHHHKDEL

SEQ ID NO: 149 - skipped

SEQ ID NO: 150 - DNA, 513 bp, Plasmodium falciparum
aaggtgacagttgatactgtgtgcaagaggggtttccttattcagatgtctggacaccttgagtgtaagtgcgagaacgatcttgttcttgtgaacgaagagacttgcgaagagaaggtgttgaagtgcgatgagaaaactgtgaacaagccatgcggagatttctctaagtgcattaagattgatggaaacccagtgtcttatgcttgcaagtgcaaccttggatacgatatggtgaacaatgtgtgcattccaaacgagtgcaagaacgtgacttgcggaaacggaaagtgcattcttgatacttctaacccagttaagactgctgtgtgtagttgcaacattggaaaggtgccaaacgttcaggatcagaacaagtgctctaaggatggtgaaactaagtgctctcttaagtgccttaaagagaacgagacttgcaaggctgtggatggtatttacaagtgcgattgcaaggatggattcattattgataacgagtcatctatctgcact

SEQ ID NO: 151 - skipped

SEQ ID NO: 152 - protein, 171 aa, Plasmodium falciparum
KVTVDTVCKRGFLIQMSGHLECKCENDLVLVNEETCEEKVLKCDEKTVNKPCGDFSKCIKIDGNPVSYACKCNLGYDMVNNVCIPNECKNVTCGNGKCILDTSNPVKTAVCSCNIGKVPNVQDQNKCSKDGETKCSLKCLKENETCKAVDGIYKCDCKDGFIIDNESSICT

SEQ ID NO: 153 - DNA, 1176 bp, Plasmodium falciparum
ggaggttcttatccatataagtctggtgagtatagaactaagtctttctttggatatggttattatgaagttaggatgaaggctgcaaagaacgttggaattgtttcttctttctttacttatactggaccatctgataacaacccatgggatgagattgatattgagtttcttggaaaggatactactaaggttcaattcaactggtataagaatggtgttggtggaaacgagtatcttcataaccttggatttgatgcttctcaagattttcatacttatggttttgagtggagaccagattatattgatttttatgttgatggaaagaaggtttatagaggtactagaaacattccagttactcctggaaagattatgatgaatctttggccaggaattggtgttgatgaatggcttggtagatatgatggaagaactccacttcaagctgagtatgagtatgttaagtattatccaaacggtagatctaaggtgacagttgatactgtgtgcaagaggggtttccttattcagatgtctggacaccttgagtgtaagtgcgagaacgatcttgttcttgtgaacgaagagacttgcgaagagaaggtgttgaagtgcgatgagaaaactgtgaacaagccatgcggagatttctctaagtgcattaagattgatggaaacccagtgtcttatgcttgcaagtgcaaccttggatacgatatggtgaacaatgtgtgcattccaaacgagtgcaagaacgtgacttgcggaaacggaaagtgcattcttgatacttctaacccagttaagactgctgtgtgtagttgcaacattggaaaggtgccaaacgttcaggatcagaacaagtgctctaaggatggtgaaactaagtgctctcttaagtgccttaaagagaacgagacttgcaaggctgtggatggtatttacaagtgcgattgcaaggatggattcattattgataacgagtcatctatctgcactaagcttgttgttaatactccatttgttgctgttttctctaactttgattcttctcaatgggaaaaggctgattgggctaacggttctgtttttaactgtgtttggaagccatctcaagttactttttctaacggaaagatgattcttactttggatagagagtatgtcgac

SEQ ID NO: 154 - protein, 394 aa, Plasmodium falciparum
QNGGSYPYKSGEYRTKSFFGYGYYEVRMKAAKNVGIVSSFFTYTGPSDNNPWDEIDIEFLGKDTTKVQFNWYKNGVGGNEYLHNLGFDASQDFHTYGFEWRPDYIDFYVDGKKVYRGTRNIPVTPGKIMMNLWPGIGVDEWLGRYDGRTPLQAEYEYVKYYPNGRSKVTVDTVCKRGFLIQMSGHLECKCENDLVLVNEETCEEKVLKCDEKTVNKPCGDFSKCIKIDGNPVSYACKCNLGYDMVNNVCIPNECKNVTCGNGKCILDTSNPVKTAVCSCNIGKVPNVQDQNKCSKDGETKCSLKCLKENETCKAVDGIYKCDCKDGFIIDNESSICTKLVVNTPFVAVFSNFDSSQWEKADWANGSVFNCVWKPSQVTFSNGKMILTLDREYVD

SEQ ID NO: 155 - DNA, 1182 bp, Plasmodium falciparum
ggaggttcttatccatataagtctggtgagtatagaactaagtctttctttggatatggttattatgaagttaggatgaaggctgcaaagaacgttggaattgtttcttctttctttacttatactggaccatctgataacaacccatgggatgagattgatattgagtttcttggaaaggatactactaaggttcaattcaactggtataagaatggtgttggtggaaacgagtatcttcataaccttggatttgatgcttctcaagattttcatacttatggttttgagtggagaccagattatattgatttttatgttgatggaaagaaggtttatagaggtactagaaacattccagttactcctggaaagattatgatgaatctttggccaggaattggtgttgatgaatggcttggtagatatgatggaagaactccacttcaagctgagtatgagtatgttaagtattatccaaacggtagatctgaattcaagcttgttgttaatactccatttgttgctgttttctctaactttgattcttctcaatgggaaaaggctgattgggctaacggttctgtttttaactgtgtttggaagccatctcaagttactttttctaacggaaagatgattcttactttggatagagagtatgtcgacaaggtgacagttgatactgtgtgcaagaggggtttccttattcagatgtctggacaccttgagtgtaagtgcgagaacgatcttgttcttgtgaacgaagagacttgcgaagagaaggtgttgaagtgcgatgagaaaactgtgaacaagccatgcggagatttctctaagtgcattaagattgatggaaacccagtgtcttatgcttgcaagtgcaaccttggatacgatatggtgaacaatgtgtgcattccaaacgagtgcaagaacgtgacttgcggaaacggaaagtgcattcttgatacttctaacccagttaagactgctgtgtgtagttgcaacattggaaaggtgccaaacgttcaggatcagaacaagtgctctaaggatggtgaaactaagtgctctcttaagtgccttaaagagaacgagacttgcaaggctgtggatggtatttacaagtgcgattgcaaggatggattcattattgataacgagtcatctatctgcact

SEQ ID NO: 156 - protein, 396 aa, Plasmodium falciparum
QNGGSYPYKSGEYRTKSFFGYGYYEVRMKAAKNVGIVSSFFTYTGPSDNNPWDEIDIEFLGKDTTKVQFNWYKNGVGGNEYLHNLGFDASQDFHTYGFEWRPDYIDFYVDGKKVYRGTRNIPVTPGKIMMNLWPGIGVDEWLGRYDGRTPLQAEYEYVKYYPNGRSEFKLVVNTPFVAVFSNFDSSQWEKADWANGSVFNCVWKPSQVTFSNGKMILTLDREYVDKVTVDTVCKRGFLIQMSGHLECKCENDLVLVNEETCEEKVLKCDEKTVNKPCGDFSKCIKIDGNPVSYACKCNLGYDMVNNVCIPNECKNVTCGNGKCILDTSNPVKTAVCSCNIGKVPNVQDQNKCSKDGETKCSLKCLKENETCKAVDGIYKCDCKDGFIIDNESSICT

SEQ ID NO: 157 - DNA, 513 bp, Plasmodium falciparum
aaggtgacagttgatactgtgtgcaagaggggtttccttattcagatgtctggacaccttgagtgtaagtgcgagaacgatcttgttcttgtgaacgaagagacttgcgaagagaaggtgttgaagtgcgatgagaaaactgtgaacaagccatgcggagatttctctaagtgcattaagattgatggaaacccagtgtcttatgcttgcaagtgcaaccttggatacgatatggtgaacaatgtgtgcattccaaacgagtgcaagcaagtgacttgcggaaacggaaagtgcattcttgatacttctaacccagttaagactgctgtgtgtagttgcaacattggaaaggtgccaaacgttcaggatcagaacaagtgctctaaggatggtgaaactaagtgctctcttaagtgccttaaagagaacgagacttgcaaggctgtggatggtatttacaagtgcgattgcaaggatggattcattattgatcaagagtcatctatctgcact

SEQ ID NO: 158 - protein, 171 aa, Plasmodium falciparum
KVTVDTVCKRGFLIQMSGHLECKCENDLVLVNEETCEEKVLKCDEKTVNKPCGDFSKCIKIDGNPVSYACKCNLGYDMVNNVCIPNECKQVTCGNGKCILDTSNPVKTAVCSCNIGKVPNVQDQNKCSKDGETKCSLKCLKENETCKAVDGIYKCDCKDGFIIDQESSICT

SEQ ID NO: 159 - DNA, 1203 bp, Plasmodium falciparum
ggaggttcttatccatataagtctggtgagtatagaactaagtctttctttggatatggttattatgaagttaggatgaaggctgcaaagaacgttggaattgtttcttctttctttacttatactggaccatctgataacaacccatgggatgagattgatattgagtttcttggaaaggatactactaaggttcaattcaactggtataagaatggtgttggtggaaacgagtatcttcataaccttggatttgatgcttctcaagattttcatacttatggttttgagtggagaccagattatattgatttttatgttgatggaaagaaggtttatagaggtactagaaacattccagttactcctggaaagattatgatgaatctttggccaggaattggtgttgatgaatggcttggtagatatgatggaagaactccacttcaagctgagtatgagtatgttaagtattatccaaacggtagatctaaggtgacagttgatactgtgtgcaagaggggtttccttattcagatgtctggacaccttgagtgtaagtgcgagaacgatcttgttcttgtgaacgaagagacttgcgaagagaaggtgttgaagtgcgatgagaaaactgtgaacaagccatgcggagatttctctaagtgcattaagattgatggaaacccagtgtcttatgcttgcaagtgcaaccttggatacgatatggtgaacaatgtgtgcattccaaacgagtgcaagcaagtgacttgcggaaacggaaagtgcattcttgatacttctaacccagttaagactgctgtgtgtagttgcaacattggaaaggtgccaaacgttcaggatcagaacaagtgctctaaggatggtgaaactaagtgctctcttaagtgccttaaagagaacgagacttgcaaggctgtggatggtatttacaagtgcgattgcaaggatggattcattattgatcaagagtcatctatctgcactaagcttgttgttaatactccatttgttgctgttttctctaactttgattcttctcaatgggaaaaggctgattgggctaacggttctgtttttaactgtgtttggaagccatctcaagttactttttctaacggaaagatgattcttactttggatagagagtatgtcgaccatcatcatcatcatcataaggatgaa

SEQ ID NO: 160 - protein, 392 aa, Plasmodium falciparum
QNGGSYPYKSGEYRTKSFFGYGYYEVRMKAAKNVGIVSSFFTYTGPSDNNPWDEIDIEFLGKDTTKVQFNWYKNGVGGNEYLHNLGFDASQDFHTYGFEWRPDYIDFYVDGKKVYRGTRNIPVTPGKIMMNLWPGIGVDEWLGRYDGRTPLQAEYEYVKYYPNGRSKVTVDTVCKRGFLIQMSGHLECKCENDLVLVNEETCEEKVLKCDEKTVNKPCGDFSKCIKIDGNPVSYACKCNLGYDMVNNVCIPNECKQVTCGNGKCILDTSNPVKTAVCSCNIGKVPNVQDQNKCSKDGETKCSLKCLKENETCKAVDGIYKCDCKDGFIIDQESSICTKLVVNTPFVAVFSNFDSSQWEKADWANGSVFNCVWKPSQVTFSNGKMILTLDREY

SEQ ID NO: 161 - DNA, 1221 bp, Plasmodium falciparum
ggaggttcttatccatataagtctggtgagtatagaactaagtctttctttggatatggttattatgaagttaggatgaaggctgcaaagaacgttggaattgtttcttctttctttacttatactggaccatctgataacaacccatgggatgagattgatattgagtttcttggaaaggatactactaaggttcaattcaactggtataagaatggtgttggtggaaacgagtatcttcataaccttggatttgatgcttctcaagattttcatacttatggttttgagtggagaccagattatattgatttttatgttgatggaaagaaggtttatagaggtactagaaacattccagttactcctggaaagattatgatgaatctttggccaggaattggtgttgatgaatggcttggtagatatgatggaagaactccacttcaagctgagtatgagtatgttaagtattatccaaacggtagatctgaattcaagcttgttgttaatactccatttgttgctgttttctctaactttgattcttctcaatgggaaaaggctgattgggctaacggttctgtttttaactgtgtttggaagccatctcaagttactttttctaacggaaagatgattcttactttggatagagagtatgtcgacaaggtgacagttgatactgtgtgcaagaggggtttccttattcagatgtctggacaccttgagtgtaagtgcgagaacgatcttgttcttgtgaacgaagagacttgcgaagagaaggtgttgaagtgcgatgagaaaactgtgaacaagccatgcggagatttctctaagtgcattaagattgatggaaacccagtgtcttatgcttgcaagtgcaaccttggatacgatatggtgaacaatgtgtgcattccaaacgagtgcaagcaagtgacttgcggaaacggaaagtgcattcttgatacttctaacccagttaagactgctgtgtgtagttgcaacattggaaaggtgccaaacgttcaggatcagaacaagtgctctaaggatggtgaaactaagtgctctcttaagtgccttaaagagaacgagacttgcaaggctgtggatggtatttacaagtgcgattgcaaggatggattcattattgatcaagagtcatctatctgcactgtcgaccatcatcatcatcatcataaggatgaactttga

SEQ ID NO: 162 - protein, 396 aa, Plasmodium falciparum
QNGGSYPYKSGEYRTKSFFGYGYYEVRMKAAKNVGIVSSFFTYTGPSDNNPWDEIDIEFLGKDTTKVQFNWYKNGVGGNEYLHNLGFDASQDFHTYGFEWRPDYIDFYVDGKKVYRGTRNIPVTPGKIMMNLWPGIGVDEWLGRYDGRTPLQAEYEYVKYYPNGRSEFKLVVNTPFVAVFSNFDSSQWEKADWANGSVFNCVWKPSQVTFSNGKMILTLDREYVDKVTVDTVCKRGFLIQMSGHLECKCENDLVLVNEETCEEKVLKCDEKTVNKPCGDFSKCIKIDGNPVSYACKCNLGYDMVNNVCIPNECKQVTCGNGKCILDTSNPVKTAVCSCNIGKVPNVQDQNKCSKDGETKCSLKCLKENETCKAVDGIYKCDCKDGFIIDQESSICT

SEQ ID NO: 163 - DNA, 525 bp, Plasmodium falciparum
agagttactgagaacactatctgcaagtacggataccttattcagatgtctaaccactacgagtgcaagtgtattgagggatacgtgcttattaacgaggatacttgcggaaagaaagttgtgtgcgataaggtggagaactctttcaaggcttgcgatgagtacgcttactgcttcgatcttggaaacaagaacaacgagaagcagattaagtgcatgtgcaggactgagtacactcttactgctggtgtttgcgttccaaatgtgtgcagggataaagtttgcggaaagggaaagtgcattgtggacccagctaactctcttactcacacttgctcttgcaacattggaactattcttaaccagaacaagttgtgcgatattcagggtgatactccatgctctcttaagtgcgctgagaacgaagtgtgtactcttgagggaaactactacacttgcaaagaagatccatcttctaacggtggaggaaacactgttgatcaggctgatacttcttactctgtg

SEQ ID NO: 164 - protein, 175 aa, Plasmodium falciparum
RVTENTICKYGYLIQMSNHYECKCIEGYVLINEDTCGKKVVCDKVENSFKACDEYAYCFDLGNKNNEKQIKCMCRTEYTLTAGVCVPNVCRDKVCGKGKCIVDPANSLTHTCSCNIGTILNQNKLCDIQGDTPCSLKCAENEVCTLEGNYYTCKEDPSSNGGGNTVDQADTSYSV

SEQ ID NO: 165 - DNA, 1188 bp, Plasmodium falciparum
ggaggttcttatccatataagtctggtgagtatagaactaagtctttctttggatatggttattatgaagttaggatgaaggctgcaaagaacgttggaattgtttcttctttctttacttatactggaccatctgataacaacccatgggatgagattgatattgagtttcttggaaaggatactactaaggttcaattcaactggtataagaatggtgttggtggaaacgagtatcttcataaccttggatttgatgcttctcaagattttcatacttatggttttgagtggagaccagattatattgatttttatgttgatggaaagaaggtttatagaggtactagaaacattccagttactcctggaaagattatgatgaatctttggccaggaattggtgttgatgaatggcttggtagatatgatggaagaactccacttcaagctgagtatgagtatgttaagtattatccaaacggtagatctagagttactgagaacactatctgcaagtacggataccttattcagatgtctaaccactacgagtgcaagtgtattgagggatacgtgcttattaacgaggatacttgcggaaagaaagttgtgtgcgataaggtggagaactctttcaaggcttgcgatgagtacgcttactgcttcgatcttggaaacaagaacaacgagaagcagattaagtgcatgtgcaggactgagtacactcttactgctggtgtttgcgttccaaatgtgtgcagggataaagtttgcggaaagggaaagtgcattgtggacccagctaactctcttactcacacttgctcttgcaacattggaactattcttaaccagaacaagttgtgcgatattcagggtgatactccatgctctcttaagtgcgctgagaacgaagtgtgtactcttgagggaaactactacacttgcaaagaagatccatcttctaacggtggaggaaacactgttgatcaggctgatacttcttactctgtgaagcttgttgttaatactccatttgttgctgttttctctaactttgattcttctcaatgggaaaaggctgattgggctaacggttctgtttttaactgtgtttggaagccatctcaagttactttttctaacggaaagatgattcttactttggatagagagtatgtcgac

SEQ ID NO: 166 - protein, 396 aa, Plasmodium falciparum
QNGGSYPYKSGEYRTKSFFGYGYYEVRMKAAKNVGIVSSFFTYTGPSDNNPWDEIDIEFLGKDTTKVQFNWYKNGVGGNEYLHNLGFDASQDFHTYGFEWRPDYIDFYVDGKKVYRGTRNIPVTPGKIMMNLWPGIGVDEWLGRYDGRTPLQAEYEYVKYYPNGRSRVTENTICKYGYLIQMSNHYECKCIEGYVLINEDTCGKKVVCDKVENSFKACDEYAYCFDLGNKNNEKQIKCMCRTEYTLTAGVCVPNVCRDKVCGKGKCIVDPANSLTHTCSCNIGTILNQNKLCDIQGDTPCSLKCAENEVCTLEGNYYTCKEDPSSNGGGNTVDQADTSYSVKLVVNTPFVAVFSNFDSSQWEKADWANGSVFNCVWKPSQVTFSNGKMILTLDREY

SEQ ID NO: 167 - DNA, 1200 bp, Plasmodium falciparum
ggaggttcttatccatataagtctggtgagtatagaactaagtctttctttggatatggttattatgaagttaggatgaaggctgcaaagaacgttggaattgtttcttctttctttacttatactggaccatctgataacaacccatgggatgagattgatattgagtttcttggaaaggatactactaaggttcaattcaactggtataagaatggtgttggtggaaacgagtatcttcataaccttggatttgatgcttctcaagattttcatacttatggttttgagtggagaccagattatattgatttttatgttgatggaaagaaggtttatagaggtactagaaacattccagttactcctggaaagattatgatgaatctttggccaggaattggtgttgatgaatggcttggtagatatgatggaagaactccacttcaagctgagtatgagtatgttaagtattatccaaacggtagatctgaattcaagcttgttgttaatactccatttgttgctgttttctctaactttgattcttctcaatgggaaaaggctgattgggctaacggttctgtttttaactgtgtttggaagccatctcaagttactttttctaacggaaagatgattcttactttggatagagagtatgtcgacagagttactgagaacactatctgcaagtacggataccttattcagatgtctaaccactacgagtgcaagtgtattgagggatacgtgcttattaacgaggatacttgcggaaagaaagttgtgtgcgataaggtggagaactctttcaaggcttgcgatgagtacgcttactgcttcgatcttggaaacaagaacaacgagaagcagattaagtgcatgtgcaggactgagtacactcttactgctggtgtttgcgttccaaatgtgtgcagggataaagtttgcggaaagggaaagtgcattgtggacccagctaactctcttactcacacttgctcttgcaacattggaactattcttaaccagaacaagttgtgcgatattcagggtgatactccatgctctcttaagtgcgctgagaacgaagtgtgtactcttgagggaaactactacacttgcaaagaagatccatcttctaacggtggaggaaacactgttgatcaggctgatacttcttactctgtggtcgac

SEQ ID NO: 168 - protein, 400 aa, Plasmodium falciparum
QNGGSYPYKSGEYRTKSFFGYGYYEVRMKAAKNVGIVSSFFTYTGPSDNNPWDEIDIEFLGKDTTKVQFNWYKNGVGGNEYLHNLGFDASQDFHTYGFEWRPDYIDFYVDGKKVYRGTRNIPVTPGKIMMNLWPGIGVDEWLGRYDGRTPLQAEYEYVKYYPNGRSEFKLVVNTPFVAVFSNFDSSQWEKADWANGSVFNCVWKPSQVTFSNGKMILTLDREYVDRVTENTICKYGYLIQMSNHYECKCIEGYVLINEDTCGKKVVCDKVENSFKACDEYAYCFDLGNKNNEKQIKCMCRTEYTLTAGVCVPNVCRDKVCGKGKCIVDPANSLTHTCSCNIGTILNQNKLCDIQGDTPCSLKCAENEVCTLEGNYYTCKEDPSSNGGGNTVDQADTSYSV

SEQ ID NO: 169 - DNA, 1203 bp, Plasmodium falciparum
aacaacgatttctgcaagccatcttctcttaactctgagatttctggattcattggatacaagtgcaacttctctaacgagggtgttcacaaccttaagccagatatgagagagagaagatcaattttctgcactattcactcttacttcatttacgataagattaggcttattattccaaagaagtcatcttctccagagttcaagattcttccagagaagtgcttccagaaggtgtacactgattacgagaacagggtggagactgatatttctgagcttggacttattgagtacgagattgaagagaacgatacaaacccaaactacaacgagaggactattactatttctccattctctccaaaggatattgagttcttctgcttctgcgataacactgagaaagtgatttcttctattgagggaagatcagctatggttcatgtgagggtgttgaagtacccacacaacattcttttcactaaccttactaacgatcttttcacttacttgccaaagacttacaacgagtctaacttcgtgtctaacgtgcttgaggtggagcttaatgatggtgagttgttcgttcttgcttgcgagcttattaacaagaagtgtttccaagagggaaaagagaaggctctttacaagtctaacaagattatttaccacaagaaccttactattttcaaggctccattctacgtgacttctaaggatgtgaacactgagtgcacttgcaagttcaagaacaacaactacaagattgtgcttaagccaaagtacgagaagaaagtgattcacggatgcaacttctcatctaacgtgtcatctaagcacactttcactgattctcttgatatttctcttgtggatgattctgctcacatttcttgcaacgtgcacctttctgagccaaagtacaaccaccttgtgggacttaattgcccaggtgatattattccagattgcttcttccaggtttaccaaccagagtctgaagaacttgagccatctaacattgtgtaccttgattctcagattaacattggagatattgagtactacgaggatgctgagggtgatgataagattaagttgttcggaattgtgggatctattccaaagactacttctttcacttgcatctgcaagaaggataagaaatctgcttacatgactgtgactattgattcagct

SEQ ID NO: 170 - protein, 431 aa, Plasmodium falciparum
MGFVLFSQLPSFLLVSTLLLFLVISHSCRANNDFCKPSSLNSEISGFIGYKCNFSNEGVHNLKPDMRERRSIFCTIHSYFIYDKIRLIIPKKSSSPEFKILPEKCFQKVYTDYENRVETDISELGLIEYEIEENDTNPNYNERTITISPFSPKDIEFFCFCDNTEKVISSIEGRSAMVHVRVLKYPHNILFTNLTNDLFTYLPKTYNESNFVSNVLEVELNDGELFVLACELINKKCFQEGKEKALYKSNKIIYHKNLTIFKAPFYVTSKDVNTECTCKFKNNNYKIVLKPKYEKKVIHGCNFSSNVSSKHTFTDSLDISLVDDSAHISCNVHLSEPKYNHLVGLNCPGDIIPDCFFQVYQPESEELEPSNIVYLDSQINIGDIEYYEDAEGDDKIKLFGIVGSIPKTTSFTCICKKDKKSAYMTVTIDSA

SEQ ID NO: 171 - DNA, 1866 bp, Plasmodium falciparum
ggaggttcttatccatataagtctggtgagtatagaactaagtctttctttggatatggttattatgaagttaggatgaaggctgcaaagaacgttggaattgtttcttctttctttacttatactggaccatctgataacaacccatgggatgagattgatattgagtttcttggaaaggatactactaaggttcaattcaactggtataagaatggtgttggtggaaacgagtatcttcataaccttggatttgatgcttctcaagattttcatacttatggttttgagtggagaccagattatattgatttttatgttgatggaaagaaggtttatagaggtactagaaacattccagttactcctggaaagattatgatgaatctttggccaggaattggtgttgatgaatggcttggtagatatgatggaagaactccacttcaagctgagtatgagtatgttaagtattatccaaacggtagatctaacaacgatttctgcaagccatcttctcttaactctgagatttctggattcattggatacaagtgcaacttctctaacgagggtgttcacaaccttaagccagatatgagagagagaagatcaattttctgcactattcactcttacttcatttacgataagattaggcttattattccaaagaagtcatcttctccagagttcaagattcttccagagaagtgcttccagaaggtgtacactgattacgagaacagggtggagactgatatttctgagcttggacttattgagtacgagattgaagagaacgatacaaacccaaactacaacgagaggactattactatttctccattctctccaaaggatattgagttcttctgcttctgcgataacactgagaaagtgatttcttctattgagggaagatcagctatggttcatgtgagggtgttgaagtacccacacaacattcttttcactaaccttactaacgatcttttcacttacttgccaaagacttacaacgagtctaacttcgtgtctaacgtgcttgaggtggagcttaatgatggtgagttgttcgttcttgcttgcgagcttattaacaagaagtgtttccaagagggaaaagagaaggctctttacaagtctaacaagattatttaccacaagaaccttactattttcaaggctccattctacgtgacttctaaggatgtgaacactgagtgcacttgcaagttcaagaacaacaactacaagattgtgcttaagccaaagtacgagaagaaagtgattcacggatgcaacttctcatctaacgtgtcatctaagcacactttcactgattctcttgatatttctcttgtggatgattctgctcacatttcttgcaacgtgcacctttctgagccaaagtacaaccaccttgtgggacttaattgcccaggtgatattattccagattgcttcttccaggtttaccaaccagagtctgaagaacttgagccatctaacattgtgtaccttgattctcagattaacattggagatattgagtactacgaggatgctgagggtgatgataagattaagttgttcggaattgtgggatctattccaaagactacttctttcacttgcatctgcaagaaggataagaaatctgcttacatgactgtgactattgattcagctaagcttgttgttaatactccatttgttgctgttttctctaactttgattcttctcaatgggaaaaggctgattgggctaacggttctgtttttaactgtgtttggaagccatctcaagttactttttctaacggaaagatgattcttactttggatagagagtatgtcgac

SEQ ID NO: 172 - protein, 622 aa, Plasmodium falciparum
QNGGSYPYKSGEYRTKSFFGYGYYEVRMKAAKNVGIVSSFFTYTGPSDNNPWDEIDIEFLGKDTTKVQFNWYKNGVGGNEYLHNLGFDASQDFHTYGFEWRPDYIDFYVDGKKVYRGTRNIPVTPGKIMMNLWPGIGVDEWLGRYDGRTPLQAEYEYVKYYPNGRSNNDFCKPSSLNSEISGFIGYKCNFSNEGVHNLKPDMRERRSIFCTIHSYFIYDKIRLIIPKKSSSPEFKILPEKCFQKVYTDYENRVETDISELGLIEYEIEENDTNPNYNERTITISPFSPKDIEFFCFCDNTEKVISSIEGRSAMVHVRVLKYPHNILFTNLTNDLFTYLPKTYNESNFVSNVLEVELNDGELFVLACELINKKCFQEGKEKALYKSNKIIYHKNLTIFKAPFYVTSKDVNTECTCKFKNNNYKIVLKPKYEKKVIHGCNFSSNVSSKHTFTDSLDISLVDDSAHISCNVHLSEPKYNHLVGLNCPGDIIPDCFFQVYQPESEELEPSNIVYLDSQINIGDIEYYEDAEGDDKIKLFGIVGSIPKTTSFTCICKKDKKSAYMTVTIDSAKLVVNTPFVAVFSNFDSSQWEKADWANGSVFNCVWKPSQVTFSNGKMILTLDREY

SEQ ID NO: 173 - DNA, 1878 bp, Plasmodium falciparum
ggaggttcttatccatataagtctggtgagtatagaactaagtctttctttggatatggttattatgaagttaggatgaaggctgcaaagaacgttggaattgtttcttctttctttacttatactggaccatctgataacaacccatgggatgagattgatattgagtttcttggaaaggatactactaaggttcaattcaactggtataagaatggtgttggtggaaacgagtatcttcataaccttggatttgatgcttctcaagattttcatacttatggttttgagtggagaccagattatattgatttttatgttgatggaaagaaggtttatagaggtactagaaacattccagttactcctggaaagattatgatgaatctttggccaggaattggtgttgatgaatggcttggtagatatgatggaagaactccacttcaagctgagtatgagtatgttaagtattatccaaacggtagatctgaattcaagcttgttgttaatactccatttgttgctgttttctctaactttgattcttctcaatgggaaaaggctgattgggctaacggttctgtttttaactgtgtttggaagccatctcaagttactttttctaacggaaagatgattcttactttggatagagagtatgtcgacaacaacgatttctgcaagccatcttctcttaactctgagatttctggattcattggatacaagtgcaacttctctaacgagggtgttcacaaccttaagccagatatgagagagagaagatcaattttctgcactattcactcttacttcatttacgataagattaggcttattattccaaagaagtcatcttctccagagttcaagattcttccagagaagtgcttccagaaggtgtacactgattacgagaacagggtggagactgatatttctgagcttggacttattgagtacgagattgaagagaacgatacaaacccaaactacaacgagaggactattactatttctccattctctccaaaggatattgagttcttctgcttctgcgataacactgagaaagtgatttcttctattgagggaagatcagctatggttcatgtgagggtgttgaagtacccacacaacattcttttcactaaccttactaacgatcttttcacttacttgccaaagacttacaacgagtctaacttcgtgtctaacgtgcttgaggtggagcttaatgatggtgagttgttcgttcttgcttgcgagcttattaacaagaagtgtttccaagagggaaaagagaaggctctttacaagtctaacaagattatttaccacaagaaccttactattttcaaggctccattctacgtgacttctaaggatgtgaacactgagtgcacttgcaagttcaagaacaacaactacaagattgtgcttaagccaaagtacgagaagaaagtgattcacggatgcaacttctcatctaacgtgtcatctaagcacactttcactgattctcttgatatttctcttgtggatgattctgctcacatttcttgcaacgtgcacctttctgagccaaagtacaaccaccttgtgggacttaattgcccaggtgatattattccagattgcttcttccaggtttaccaaccagagtctgaagaacttgagccatctaacattgtgtaccttgattctcagattaacattggagatattgagtactacgaggatgctgagggtgatgataagattaagttgttcggaattgtgggatctattccaaagactacttctttcacttgcatctgcaagaaggataagaaatctgcttacatgactgtgactattgattcagctgtcgac

SEQ ID NO: 174 - protein, 626 aa, Plasmodium falciparum
QNGGSYPYKSGEYRTKSFFGYGYYEVRMKAAKNVGIVSSFFTYTGPSDNNPWDEIDIEFLGKDTTKVQFNWYKNGVGGNEYLHNLGFDASQDFHTYGFEWRPDYIDFYVDGKKVYRGTRNIPVTPGKIMMNLWPGIGVDEWLGRYDGRTPLQAEYEYVKYYPNGRSEFKLVVNTPFVAVFSNFDSSQWEKADWANGSVFNCVWKPSQVTFSNGKMILTLDREYVDNNDFCKPSSLNSEISGFIGYKCNFSNEGVHNLKPDMRERRSIFCTIHSYFIYDKIRLIIPKKSSSPEFKILPEKCFQKVYTDYENRVETDISELGLIEYEIEENDTNPNYNERTITISPFSPKDIEFFCFCDNTEKVISSIEGRSAMVHVRVLKYPHNILFTNLTNDLFTYLPKTYNESNFVSNVLEVELNDGELFVLACELINKKCFQEGKEKALYKSNKIIYHKNLTIFKAPFYVTSKDVNTECTCKFKNNNYKIVLKPKYEKKVIHGCNFSSNVSSKHTFTDSLDISLVDDSAHISCNVHLSEPKYNHLVGLNCPGDIIPDCFFQVYQPESEELEPSNIVYLDSQINIGDIEYYEDAEGDDKIKLFGIVGSIPKTTSFTCICKKDKKSAYMTVTIDSA

SEQ ID NO: 175 - DNA, 1203 bp, Plasmodium falciparum
aacaacgatttctgcaagccatcttctcttaactctgagatttctggattcattggatacaagtgcaacttctctaacgagggtgttcacaaccttaagccagatatgagagagagaagatcaattttctgcactattcactcttacttcatttacgataagattaggcttattattccaaagaagtcatcttctccagagttcaagattcttccagagaagtgcttccagaaggtgtacactgattacgagaacagggtggagactgatatttctgagcttggacttattgagtacgagattgaagagcaagatacaaacccaaactacaacgagaggactattactatttctccattctctccaaaggatattgagttcttctgcttctgcgataacactgagaaagtgatttcttctattgagggaagatcagctatggttcatgtgagggtgttgaagtacccacacaacattcttttcactcaacttactaacgatcttttcacttacttgccaaagacttaccaagagtctaacttcgtgtctaacgtgcttgaggtggagcttaatgatggtgagttgttcgttcttgcttgcgagcttattaacaagaagtgtttccaagagggaaaagagaaggctctttacaagtctaacaagattatttaccacaagaaccttactattttcaaggctccattctacgtgacttctaaggatgtgaacactgagtgcacttgcaagttcaagaacaacaactacaagattgtgcttaagccaaagtacgagaagaaagtgattcacggatgcaacttctcatctcaagtgtcatctaagcacactttcactgattctcttgatatttctcttgtggatgattctgctcacatttcttgcaacgtgcacctttctgagccaaagtacaaccaccttgtgggacttaattgcccaggtgatattattccagattgcttcttccaggtttaccaaccagagtctgaagaacttgagccatctaacattgtgtaccttgattctcagattaacattggagatattgagtactacgaggatgctgagggtgatgataagattaagttgttcggaattgtgggatctattccaaagactacttctttcacttgcatctgcaagaaggataagaaatctgcttacatgactgtgactattgattcagct

SEQ ID NO: 176 - protein, 401 aa, Plasmodium falciparum
NNDFCKPSSLNSEISGFIGYKCNFSNEGVHNLKPDMRERRSIFCTIHSYFIYDKIRLIIPKKSSSPEFKILPEKCFQKVYTDYENRVETDISELGLIEYEIEEQDTNPNYNERTITISPFSPKDIEFFCFCDNTEKVISSIEGRSAMVHVRVLKYPHNILFTQLTNDLFTYLPKTYQESNFVSNVLEVELNDGELFVLACELINKKCFQEGKEKALYKSNKIIYHKNLTIFKAPFYVTSKDVNTECTCKFKNNNYKIVLKPKYEKKVIHGCNFSSQVSSKHTFTDSLDISLVDDSAHISCNVHLSEPKYNHLVGLNCPGDIIPDCFFQVYQPESEELEPSNIVYLDSQINIGDIEYYEDAEGDDKIKLFGIVGSIPKTTSFTCICKKDKKSAYMTVTIDSA

SEQ ID NO: 177 - DNA, 1866 bp, Plasmodium falciparum
ggaggttcttatccatataagtctggtgagtatagaactaagtctttctttggatatggttattatgaagttaggatgaaggctgcaaagaacgttggaattgtttcttctttctttacttatactggaccatctgataacaacccatgggatgagattgatattgagtttcttggaaaggatactactaaggttcaattcaactggtataagaatggtgttggtggaaacgagtatcttcataaccttggatttgatgcttctcaagattttcatacttatggttttgagtggagaccagattatattgatttttatgttgatggaaagaaggtttatagaggtactagaaacattccagttactcctggaaagattatgatgaatctttggccaggaattggtgttgatgaatggcttggtagatatgatggaagaactccacttcaagctgagtatgagtatgttaagtattatccaaacggtagatctaacaacgatttctgcaagccatcttctcttaactctgagatttctggattcattggatacaagtgcaacttctctaacgagggtgttcacaaccttaagccagatatgagagagagaagatcaattttctgcactattcactcttacttcatttacgataagattaggcttattattccaaagaagtcatcttctccagagttcaagattcttccagagaagtgcttccagaaggtgtacactgattacgagaacagggtggagactgatatttctgagcttggacttattgagtacgagattgaagagcaagatacaaacccaaactacaacgagaggactattactatttctccattctctccaaaggatattgagttcttctgcttctgcgataacactgagaaagtgatttcttctattgagggaagatcagctatggttcatgtgagggtgttgaagtacccacacaacattcttttcactcaacttactaacgatcttttcacttacttgccaaagacttaccaagagtctaacttcgtgtctaacgtgcttgaggtggagcttaatgatggtgagttgttcgttcttgcttgcgagcttattaacaagaagtgtttccaagagggaaaagagaaggctctttacaagtctaacaagattatttaccacaagaaccttactattttcaaggctccattctacgtgacttctaaggatgtgaacactgagtgcacttgcaagttcaagaacaacaactacaagattgtgcttaagccaaagtacgagaagaaagtgattcacggatgcaacttctcatctcaagtgtcatctaagcacactttcactgattctcttgatatttctcttgtggatgattctgctcacatttcttgcaacgtgcacctttctgagccaaagtacaaccaccttgtgggacttaattgcccaggtgatattattccagattgcttcttccaggtttaccaaccagagtctgaagaacttgagccatctaacattgtgtaccttgattctcagattaacattggagatattgagtactacgaggatgctgagggtgatgataagattaagttgttcggaattgtgggatctattccaaagactacttctttcacttgcatctgcaagaaggataagaaatctgcttacatgactgtgactattgattcagctaagcttgttgttaatactccatttgttgctgttttctctaactttgattcttctcaatgggaaaaggctgattgggctaacggttctgtttttaactgtgtttggaagccatctcaagttactttttctaacggaaagatgattcttactttggatagagagtatgtcgac

SEQ ID NO: 178 - protein, 622 aa, Plasmodium falciparum
QNGGSYPYKSGEYRTKSFFGYGYYEVRMKAAKNVGIVSSFFTYTGPSDNNPWDEIDIEFLGKDTTKVQFNWYKNGVGGNEYLHNLGFDASQDFHTYGFEWRPDYIDFYVDGKKVYRGTRNIPVTPGKIMMNLWPGIGVDEWLGRYDGRTPLQAEYEYVKYYPNGRSNNDFCKPSSLNSEISGFIGYKCNFSNEGVHNLKPDMRERRSIFCTIHSYFIYDKIRLIIPKKSSSPEFKILPEKCFQKVYTDYENRVETDISELGLIEYEIEEQDTNPNYNERTITISPFSPKDIEFFCFCDNTEKVISSIEGRSAMVHVRVLKYPHNILFTQLTNDLFTYLPKTYQESNFVSNVLEVELNDGELFVLACELINKKCFQEGKEKALYKSNKIIYHKNLTIFKAPFYVTSKDVNTECTCKFKNNNYKIVLKPKYEKKVIHGCNFSSQVSSKHTFTDSLDISLVDDSAHISCNVHLSEPKYNHLVGLNCPGDIIPDCFFQVYQPESEELEPSNIVYLDSQINIGDIEYYEDAEGDDKIKLFGIVGSIPKTTSFTCICKKDKKSAYMTVTIDSAKLVVNTPFVAVFSNFDSSQWEKADWANGSVFNCVWKPSQVTFSNGKMILTLDREY

SEQ ID NO: 179 - DNA, 1878 bp, Plasmodium falciparum
ggaggttcttatccatataagtctggtgagtatagaactaagtctttctttggatatggttattatgaagttaggatgaaggctgcaaagaacgttggaattgtttcttctttctttacttatactggaccatctgataacaacccatgggatgagattgatattgagtttcttggaaaggatactactaaggttcaattcaactggtataagaatggtgttggtggaaacgagtatcttcataaccttggatttgatgcttctcaagattttcatacttatggttttgagtggagaccagattatattgatttttatgttgatggaaagaaggtttatagaggtactagaaacattccagttactcctggaaagattatgatgaatctttggccaggaattggtgttgatgaatggcttggtagatatgatggaagaactccacttcaagctgagtatgagtatgttaagtattatccaaacggtagatctgaattcaagcttgttgttaatactccatttgttgctgttttctctaactttgattcttctcaatgggaaaaggctgattgggctaacggttctgtttttaactgtgtttggaagccatctcaagttactttttctaacggaaagatgattcttactttggatagagagtatgtcgacaacaacgatttctgcaagccatcttctcttaactctgagatttctggattcattggatacaagtgcaacttctctaacgagggtgttcacaaccttaagccagatatgagagagagaagatcaattttctgcactattcactcttacttcatttacgataagattaggcttattattccaaagaagtcatcttctccagagttcaagattcttccagagaagtgcttccagaaggtgtacactgattacgagaacagggtggagactgatatttctgagcttggacttattgagtacgagattgaagagcaagatacaaacccaaactacaacgagaggactattactatttctccattctctccaaaggatattgagttcttctgcttctgcgataacactgagaaagtgatttcttctattgagggaagatcagctatggttcatgtgagggtgttgaagtacccacacaacattcttttcactcaacttactaacgatcttttcacttacttgccaaagacttaccaagagtctaacttcgtgtctaacgtgcttgaggtggagcttaatgatggtgagttgttcgttcttgcttgcgagcttattaacaagaagtgtttccaagagggaaaagagaaggctctttacaagtctaacaagattatttaccacaagaaccttactattttcaaggctccattctacgtgacttctaaggatgtgaacactgagtgcacttgcaagttcaagaacaacaactacaagattgtgcttaagccaaagtacgagaagaaagtgattcacggatgcaacttctcatctcaagtgtcatctaagcacactttcactgattctcttgatatttctcttgtggatgattctgctcacatttcttgcaacgtgcacctttctgagccaaagtacaaccaccttgtgggacttaattgcccaggtgatattattccagattgcttcttccaggtttaccaaccagagtctgaagaacttgagccatctaacattgtgtaccttgattctcagattaacattggagatattgagtactacgaggatgctgagggtgatgataagattaagttgttcggaattgtgggatctattccaaagactacttctttcacttgcatctgcaagaaggataagaaatctgcttacatgactgtgactattgattcagctgtcgac

SEQ ID NO: 180 - protein, 626 aa, Plasmodium falciparum
QNGGSYPYKSGEYRTKSFFGYGYYEVRMKAAKNVGIVSSFFTYTGPSDNNPWDEIDIEFLGKDTTKVQFNWYKNGVGGNEYLHNLGFDASQDFHTYGFEWRPDYIDFYVDGKKVYRGTRNIPVTPGKIMMNLWPGIGVDEWLGRYDGRTPLQAEYEYVKYYPNGRSEFKLVVNTPFVAVFSNFDSSQWEKADWANGSVFNCVWKPSQVTFSNGKMILTLDREYVDNNDFCKPSSLNSEISGFIGYKCNFSNEGVHNLKPDMRERRSIFCTIHSYFIYDKIRLIIPKKSSSPEFKILPEKCFQKVYTDYENRVETDISELGLIEYEIEEQDTNPNYNERTITISPFSPKDIEFFCFCDNTEKVISSIEGRSAMVHVRVLKYPHNILFTQLTNDLFTYLPKTYQESNFVSNVLEVELNDGELFVLACELINKKCFQEGKEKALYKSNKIIYHKNLTIFKAPFYVTSKDVNTECTCKFKNNNYKIVLKPKYEKKVIHGCNFSSQVSSKHTFTDSLDISLVDDSAHISCNVHLSEPKYNHLVGLNCPGDIIPDCFFQVYQPESEELEPSNIVYLDSQINIGDIEYYEDAEGDDKIKLFGIVGSIPKTTSFTCICKKDKKSAYMTVTIDSA

SEQ ID NO: 181 - DNA, 1263 bp, Plasmodium falciparum
ggaggttcttatccatataagtctggtgagtatagaactaagtctttctttggatatggttattatgaagttaggatgaaggctgcaaagaacgttggaattgtttcttctttctttacttatactggaccatctgataacaacccatgggatgagattgatattgagtttcttggaaaggatactactaaggttcaattcaactggtataagaatggtgttggtggaaacgagtatcttcataaccttggatttgatgcttctcaagattttcatacttatggttttgagtggagaccagattatattgatttttatgttgatggaaagaaggtttatagaggtactagaaacattccagttactcctggaaagattatgatgaatctttggccaggaattggtgttgatgaatggcttggtagatatgatggaagaactccacttcaagctgagtatgagtatgttaagtattatccaaacggtagatctaacaacgatttctgcaagccatcttctcttaactctgagatttctggattcattggatacaagtgcaacttctctaacgagggtgttcacaaccttaagccagatatgagagagagaagatcaattttctgcactattcactcttacttcatttacgataagattaggcttattattccaaagaagtcatcttctccagagttcaagattcttccagagaagtgcttccagaaggtgtacactgattacgagaacagggtggagactgatatttctgagcttggacttattgagtacgagattgaagagaacgatacaaacccaaactacaacgagaggactattactatttctccattctctccaaaggatattgagttcttctgcttctgcgataacactgagaaagtgatttcttctattgagggaagatcagctatggttcatgtgagggtgttgaagtacccacacaacattcttttcactaaccttactaacgatcttttcacttacttgccaaagacttacaacgagtctaacttcgtgtctaacgtgcttgaggtggagcttaatgatggtgagttgttcgttcttgcttgcaagcttgttgttaatactccatttgttgctgttttctctaactttgattcttctcaatgggaaaaggctgattgggctaacggttctgtttttaactgtgtttggaagccatctcaagttactttttctaacggaaagatgattcttactttggatagagagtatgtcgac

SEQ ID NO: 182 - protein, 421 aa, Plasmodium falciparum
QNGGSYPYKSGEYRTKSFFGYGYYEVRMKAAKNVGIVSSFFTYTGPSDNNPWDEIDIEFLGKDTTKVQFNWYKNGVGGNEYLHNLGFDASQDFHTYGFEWRPDYIDFYVDGKKVYRGTRNIPVTPGKIMMNLWPGIGVDEWLGRYDGRTPLQAEYEYVKYYPNGRSNNDFCKPSSLNSEISGFIGYKCNFSNEGVHNLKPDMRERRSIFCTIHSYFIYDKIRLIIPKKSSSPEFKILPEKCFQKVYTDYENRVETDISELGLIEYEIEENDTNPNYNERTITISPFSPKDIEFFCFCDNTEKVISSIEGRSAMVHVRVLKYPHNILFTNLTNDLFTYLPKTYNESNFVSNVLEVELNDGELFVLACKLVVNTPFVAVFSNFDSSQWEKADWANGSVFNCVWKPSQVTFSNGKMILTLDREY

SEQ ID NO: 183 - DNA, 1263 bp, Plasmodium falciparum
ggaggttcttatccatataagtctggtgagtatagaactaagtctttctttggatatggttattatgaagttaggatgaaggctgcaaagaacgttggaattgtttcttctttctttacttatactggaccatctgataacaacccatgggatgagattgatattgagtttcttggaaaggatactactaaggttcaattcaactggtataagaatggtgttggtggaaacgagtatcttcataaccttggatttgatgcttctcaagattttcatacttatggttttgagtggagaccagattatattgatttttatgttgatggaaagaaggtttatagaggtactagaaacattccagttactcctggaaagattatgatgaatctttggccaggaattggtgttgatgaatggcttggtagatatgatggaagaactccacttcaagctgagtatgagtatgttaagtattatccaaacggtagatctaacaacgatttctgcaagccatcttctcttaactctgagatttctggattcattggatacaagtgcaacttctctaacgagggtgttcacaaccttaagccagatatgagagagagaagatcaattttctgcactattcactcttacttcatttacgataagattaggcttattattccaaagaagtcatcttctccagagttcaagattcttccagagaagtgcttccagaaggtgtacactgattacgagaacagggtggagactgatatttctgagcttggacttattgagtacgagattgaagagcaagatacaaacccaaactacaacgagaggactattactatttctccattctctccaaaggatattgagttcttctgcttctgcgataacactgagaaagtgatttcttctattgagggaagatcagctatggttcatgtgagggtgttgaagtacccacacaacattcttttcactaaccttactaacgatcttttcacttacttgccaaagacttacaacgagtctaacttcgtgtctaacgtgcttgaggtggagcttaatgatggtgagttgttcgtgcttgcttgcaagcttgttgttaatactccatttgttgctgttttctctaactttgattcttctcaatgggaaaaggctgattgggctaacggttctgtttttaactgtgtttggaagccatctcaagttactttttctaacggaaagatgattcttactttggatagagagtatgtcgac

SEQ ID NO: 184 - protein, 421 aa, Plasmodium falciparum
QNGGSYPYKSGEYRTKSFFGYGYYEVRMKAAKNVGIVSSFFTYTGPSDNNPWDEIDIEFLGKDTTKVQFNWYKNGVGGNEYLHNLGFDASQDFHTYGFEWRPDYIDFYVDGKKVYRGTRNIPVTPGKIMMNLWPGIGVDEWLGRYDGRTPLQAEYEYVKYYPNGRSNNDFCKPSSLNSEISGFIGYKCNFSNEGVHNLKPDMRERRSIFCTIHSYFIYDKIRLIIPKKSSSPEFKILPEKCFQKVYTDYENRVETDISELGLIEYEIEEQDTNPNYNERTITISPFSPKDIEFFCFCDNTEKVISSIEGRSAMVHVRVLKYPHNILFTNLTNDLFTYLPKTYNESNFVSNVLEVELNDGELFVLACKLVVNTPFVAVFSNFDSSQWEKADWANGSVFNCVWKPSQVTFSNGKMILTLDREY

SEQ ID NO: 185 - DNA, 1269 bp, Plasmodium falciparum
ggaggttcttatccatataagtctggtgagtatagaactaagtctttctttggatatggttattatgaagttaggatgaaggctgcaaagaacgttggaattgtttcttctttctttacttatactggaccatctgataacaacccatgggatgagattgatattgagtttcttggaaaggatactactaaggttcaattcaactggtataagaatggtgttggtggaaacgagtatcttcataaccttggatttgatgcttctcaagattttcatacttatggttttgagtggagaccagattatattgatttttatgttgatggaaagaaggtttatagaggtactagaaacattccagttactcctggaaagattatgatgaatctttggccaggaattggtgttgatgaatggcttggtagatatgatggaagaactccacttcaagctgagtatgagtatgttaagtattatccaaacggtagatctgaattcaagcttgttgttaatactccatttgttgctgttttctctaactttgattcttctcaatgggaaaaggctgattgggctaacggttctgtttttaactgtgtttggaagccatctcaagttactttttctaacggaaagatgattcttactttggatagagagtatgtcgacaacaacgatttctgcaagccatcttctcttaactctgagatttctggattcattggatacaagtgcaacttctctaacgagggtgttcacaaccttaagccagatatgagagagagaagatcaattttctgcactattcactcttacttcatttacgataagattaggcttattattccaaagaagtcatcttctccagagttcaagattcttccagagaagtgcttccagaaggtgtacactgattacgagaacagggtggagactgatatttctgagcttggacttattgagtacgagattgaagagcaagatacaaacccaaactacaacgagaggactattactatttctccattctctccaaaggatattgagttcttctgcttctgcgataacactgagaaagtgatttcttctattgagggaagatcagctatggttcatgtgagggtgttgaagtacccacacaacattcttttcactaaccttactaacgatcttttcacttacttgccaaagacttacaacgagtctaacttcgtgtctaacgtgcttgaggtggagcttaatgatggtgagttgttcgtgcttgcttgc

SEQ ID NO: 186 - protein, 425 aa, Plasmodium falciparum
QNGGSYPYKSGEYRTKSFFGYGYYEVRMKAAKNVGIVSSFFTYTGPSDNNPWDEIDIEFLGKDTTKVQFNWYKNGVGGNEYLHNLGFDASQDFHTYGFEWRPDYIDFYVDGKKVYRGTRNIPVTPGKIMMNLWPGIGVDEWLGRYDGRTPLQAEYEYVKYYPNGRSEFKLVVNTPFVAVFSNFDSSQWEKADWANGSVFNCVWKPSQVTFSNGKMILTLDREYVDNNDFCKPSSLNSEISGFIGYKCNFSNEGVHNLKPDMRERRSIFCTIHSYFIYDKIRLIIPKKSSSPEFKILPEKCFQKVYTDYENRVETDISELGLIEYEIEEQDTNPNYNERTITISPFSPKDIEFFCFCDNTEKVISSIEGRSAMVHVRVLKYPHNILFTNLTNDLFTYLPKTYNESNFVSNVLEVELNDGELFVLAC

SEQ ID NO: 187 - DNA, 1269 bp, Plasmodium falciparum
ggaggttcttatccatataagtctggtgagtatagaactaagtctttctttggatatggttattatgaagttaggatgaaggctgcaaagaacgttggaattgtttcttctttctttacttatactggaccatctgataacaacccatgggatgagattgatattgagtttcttggaaaggatactactaaggttcaattcaactggtataagaatggtgttggtggaaacgagtatcttcataaccttggatttgatgcttctcaagattttcatacttatggttttgagtggagaccagattatattgatttttatgttgatggaaagaaggtttatagaggtactagaaacattccagttactcctggaaagattatgatgaatctttggccaggaattggtgttgatgaatggcttggtagatatgatggaagaactccacttcaagctgagtatgagtatgttaagtattatccaaacggtagatcttgcgagcttattaacaagaagtgcttccaagagggaaaagagaaggctctttacaagtctaacaagattatttaccacaagaaccttactattttcaaggctccattctacgtgacttctaaggatgtgaacactgagtgcacttgcaagttcaagaacaacaactacaagattgtgcttaagccaaagtacgagaagaaagtgattcacggatgcaacttctcttctaacgtgtcatctaagcacactttcactgattctcttgatatttctcttgtggatgattctgctcacatttcttgcaacgtgcacctttctgagccaaagtacaaccaccttgtgggacttaattgcccaggtgatattattccagattgcttcttccaggtttaccaaccagagtctgaagaacttgagccatctaacattgtgtaccttgattctcagattaacattggagatattgagtactacgaggatgctgagggtgatgataagattaagttgttcggaattgtgggatctattccaaagactacttctttcacttgcatctgcaagaaggataagaaatctgcttacatgactgtgactattgattctgctaagcttgttgttaatactccatttgttgctgttttctctaactttgattcttctcaatgggaaaaggctgattgggctaacggttctgtttttaactgtgtttggaagccatctcaagttactttttctaacggaaagatgattcttactttggatagagagtatgtcgac

SEQ ID NO: 188 - protein, 423 aa, Plasmodium falciparum
QNGGSYPYKSGEYRTKSFFGYGYYEVRMKAAKNVGIVSSFFTYTGPSDNNPWDEIDIEFLGKDTTKVQFNWYKNGVGGNEYLHNLGFDASQDFHTYGFEWRPDYIDFYVDGKKVYRGTRNIPVTPGKIMMNLWPGIGVDEWLGRYDGRTPLQAEYEYVKYYPNGRSCELINKKCFQEGKEKALYKSNKIIYHKNLTIFKAPFYVTSKDVNTECTCKFKNNNYKIVLKPKYEKKVIHGCNFSSNVSSKHTFTDSLDISLVDDSAHISCNVHLSEPKYNHLVGLNCPGDIIPDCFFQVYQPESEELEPSNIVYLDSQINIGDIEYYEDAEGDDKIKLFGIVGSIPKTTSFTCICKKDKKSAYMTVTIDSAKLVVNTPFVAVFSNFDSSQWEKADWANGSVFNCVWKPSQVTFSNGKMILTLDREY

SEQ ID NO: 189 - DNA, 987 bp, Plasmodium falciparum
ggaggttcttatccatataagtctggtgagtatagaactaagtctttctttggatatggttattatgaagttaggatgaaggctgcaaagaacgttggaattgtttcttctttctttacttatactggaccatctgataacaacccatgggatgagattgatattgagtttcttggaaaggatactactaaggttcaattcaactggtataagaatggtgttggtggaaacgagtatcttcataaccttggatttgatgcttctcaagattttcatacttatggttttgagtggagaccagattatattgatttttatgttgatggaaagaaggtttatagaggtactagaaacattccagttactcctggaaagattatgatgaatctttggccaggaattggtgttgatgaatggcttggtagatatgatggaagaactccacttcaagctgagtatgagtatgttaagtattatccaaacggtagatcttgcgagcttattaacaagaagtgtttccaagagggaaaagagaaggctctttacaagtctaacaagattatttaccacaagaaccttactattttcaaggctccattctacgtgacttctaaggatgtgaacactgagtgcacttgcaagttcaagaacaacaactacaagattgtgcttaagccaaagtacgagaagaaagtgattcacggatgcaacttctcatctcaagtgtcatctaagcacactttcactgattctcttgatatttctcttgtggatgattctgctaagcttgttgttaatactccatttgttgctgttttctctaactttgattcttctcaatgggaaaaggctgattgggctaacggttctgtttttaactgtgtttggaagccatctcaagttactttttctaacggaaagatgattcttactttggatagagagtatgtcgaccatcatcatcatcatcataaggatgaactttga

SEQ ID NO: 190 - protein, 423 aa, Plasmodium falciparum
QNGGSYPYKSGEYRTKSFFGYGYYEVRMKAAKNVGIVSSFFTYTGPSDNNPWDEIDIEFLGKDTTKVQFNWYKNGVGGNEYLHNLGFDASQDFHTYGFEWRPDYIDFYVDGKKVYRGTRNIPVTPGKIMMNLWPGIGVDEWLGRYDGRTPLQAEYEYVKYYPNGRSCELINKKCFQEGKEKALYKSNKIIYHKNLTIFKAPFYVTSKDVNTECTCKFKNNNYKIVLKPKYEKKVIHGCNFSSQVSSKHTFTDSLDISLVDDSAHISCNVHLSEPKYNHLVGLNCPGDIIPDCFFQVYQPESEELEPSNIVYLDSQINIGDIEYYEDAEGDDKIKLFGIVGSIPKTTSFTCICKKDKKSAYMTVTIDSAKLVVNTPFVAVFSNFDSSQWEKADWANGSVFNCVWKPSQVTFSNGKMILTLDREY

SEQ ID NO: 191 - DNA, 1275 bp, Plasmodium falciparum
ggaggttcttatccatataagtctggtgagtatagaactaagtctttctttggatatggttattatgaagttaggatgaaggctgcaaagaacgttggaattgtttcttctttctttacttatactggaccatctgataacaacccatgggatgagattgatattgagtttcttggaaaggatactactaaggttcaattcaactggtataagaatggtgttggtggaaacgagtatcttcataaccttggatttgatgcttctcaagattttcatacttatggttttgagtggagaccagattatattgatttttatgttgatggaaagaaggtttatagaggtactagaaacattccagttactcctggaaagattatgatgaatctttggccaggaattggtgttgatgaatggcttggtagatatgatggaagaactccacttcaagctgagtatgagtatgttaagtattatccaaacggtagatctgaattcaagcttgttgttaatactccatttgttgctgttttctctaactttgattcttctcaatgggaaaaggctgattgggctaacggttctgtttttaactgtgtttggaagccatctcaagttactttttctaacggaaagatgattcttactttggatagagagtatgtcgactgcgagcttattaacaagaagtgcttccaagagggaaaagagaaggctctttacaagtctaacaagattatttaccacaagaaccttactattttcaaggctccattctacgtgacttctaaggatgtgaacactgagtgcacttgcaagttcaagaacaacaactacaagattgtgcttaagccaaagtacgagaagaaagtgattcacggatgcaacttctcttctaacgtgtcatctaagcacactttcactgattctcttgatatttctcttgtggatgattctgctcacatttcttgcaacgtgcacctttctgagccaaagtacaaccaccttgtgggacttaattgcccaggtgatattattccagattgcttcttccaggtttaccaaccagagtctgaagaacttgagccatctaacattgtgtaccttgattctcagattaacattggagatattgagtactacgaggatgctgagggtgatgataagattaagttgttcggaattgtgggatctattccaaagactacttctttcacttgcatctgcaagaaggataagaaatctgcttacatgactgtgactattgattctgct

SEQ ID NO: 192 - protein, 427 aa, Plasmodium falciparum
QNGGSYPYKSGEYRTKSFFGYGYYEVRMKAAKNVGIVSSFFTYTGPSDNNPWDEIDIEFLGKDTTKVQFNWYKNGVGGNEYLHNLGFDASQDFHTYGFEWRPDYIDFYVDGKKVYRGTRNIPVTPGKIMMNLWPGIGVDEWLGRYDGRTPLQAEYEYVKYYPNGRSEFKLVVNTPFVAVFSNFDSSQWEKADWANGSVFNCVWKPSQVTFSNGKMILTLDREYVDCELINKKCFQEGKEKALYKSNKIIYHKNLTIFKAPFYVTSKDVNTECTCKFKNNNYKIVLKPKYEKKVIHGCNFSSNVSSKHTFTDSLDISLVDDSAHISCNVHLSEPKYNHLVGLNCPGDIIPDCFFQVYQPESEELEPSNIVYLDSQINIGDIEYYEDAEGDDKIKLFGIVGSIPKTTSFTCICKKDKKSAYMTVTIDSA

SEQ ID NO: 193 - DNA, 443 bp, Plasmodium falciparum
gtgccaacaacgatttctgcaagccatcttctcttaactctgagatttctggattcattggatacaagtgcaacttctctaacgagggtgttcacaaccttaagccagatatgagagagagaagatcaattttctgcactattcactcttacttcatttacgataagattaggcttattattccaaagaagtcatcttctccagagttcaagattcttccagagaagtgcttccagaaggtgtacactgattacgagaacagggtggagactgatatttctgagcttggacttattgagtacgagattgaagagaacgatacaaacccaaactacaacgagaggactattactatttctccattctctccaaaggatattgagttcttctgcttctgcgataacactgagaaagtgatttcttctattgagggaagatcagct

SEQ ID NO: 194 - protein, 176 aa, Plasmodium falciparum
MGFVLFSQLPSFLLVSTLLLFLVISHSCRANNDFCKPSSLNSEISGFIGYKCNFSNEGVHNLKPDMRERRSIFCTIHSYFIYDKIRLIIPKKSSSPEFKILPEKCFQKVYTDYENRVETDISELGLIEYEIEENDTNPNYNERTITISPFSPKDIEFFCFCDNTEKVISSIEGRSA

SEQ ID NO: 195 - DNA, 1099 bp, Plasmodium falciparum
ggaggttcttatccatataagtctggtgagtatagaactaagtctttctttggatatggttattatgaagttaggatgaaggctgcaaagaacgttggaattgtttcttctttctttacttatactggaccatctgataacaacccatgggatgagattgatattgagtttcttggaaaggatactactaaggttcaattcaactggtataagaatggtgttggtggaaacgagtatcttcataaccttggatttgatgcttctcaagattttcatacttatggttttgagtggagaccagattatattgatttttatgttgatggaaagaaggtttatagaggtactagaaacattccagttactcctggaaagattatgatgaatctttggccaggaattggtgttgatgaatggcttggtagatatgatggaagaactccacttcaagctgagtatgagtatgttaagtattatccaaacggtagatctaacaacgatttctgcaagccatcttctcttaactctgagatttctggattcattggatacaagtgcaacttctctaacgagggtgttcacaaccttaagccagatatgagagagagaagatcaattttctgcactattcactcttacttcatttacgataagattaggcttattattccaaagaagtcatcttctccagagttcaagattcttccagagaagtgcttccagaaggtgtacactgattacgagaacagggtggagactgatatttctgagcttggacttattgagtacgagattgaagagaaacgatacaaacccaaactacaacgagaggactattactatttctccattctctccaaaggatattgagttcttctgcttctgcgataacactgagaaagtgatttcttctattgagggaagatcagctaagcttgttgttaatactccatttgttgctgttttctctaactttgattcttctcaatgggaaaaggctgattgggctaacggttctgtttttaactgtgtttggaagccatctcaagttactttttctaacggaaagatgattcttactttggatagagagtatgtc

SEQ ID NO: 196 - protein, 367 aa, Plasmodium falciparum
QNGGSYPYKSGEYRTKSFFGYGYYEVRMKAAKNVGIVSSFFTYTGPSDNNPWDEIDIEFLGKDTTKVQFNWYKNGVGGNEYLHNLGFDASQDFHTYGFEWRPDYIDFYVDGKKVYRGTRNIPVTPGKIMMNLWPGIGVDEWLGRYDGRTPLQAEYEYVKYYPNGRSNNDFCKPSSLNSEISGFIGYKCNFSNEGVHNLKPDMRERRSIFCTIHSYFIYDKIRLIIPKKSSSPEFKILPEKCFQKVYTDYENRVETDISELGLIEYEIEENDTNPNYNERTITISPFSPKDIEFFCFCDNTEKVISSIEGRSAKLVVNTPFVAVFSNFDSSQWEKADWANGSVFNCVWKPSQVTFSNGKMILTLDREY

SEQ ID NO: 197 - DNA, 765 bp, Plasmodium falciparum
atggttcatgtgagggtgttgaagtacccacacaacattcttttcactaaccttactaacgatcttttcacttacttgccaaagacttacaacgagtctaacttcgtgtctaacgtgcttgaggtggagcttaatgatggtgagttgttcgttcttgcttgcgagcttattaacaagaagtgtttccaagagggaaaagagaaggctctttacaagtctaacaagattatttaccacaagaaccttactattttcaaggctccattctacgtgacttctaaggatgtgaacactgagtgcacttgcaagttcaagaacaacaactacaagattgtgcttaagccaaagtacgagaagaaagtgattcacggatgcaacttctcatctaacgtgtcatctaagcacactttcactgattctcttgatatttctcttgtggatgattctgctcacatttcttgcaacgtgcacctttctgagccaaagtacaaccaccttgtgggacttaattgcccaggtgatattattccagattgcttcttccaggtttaccaaccagagtctgaagaacttgagccatctaacattgtgtaccttgattctcagattaacattggagatattgagtactacgaggatgctgagggtgatgataagattaagttgttcggaattgtgggatctattccaaagactacttctttcacttgcatctgcaagaaggataagaaatctgcttacatgactgtgactattgattcagct

SEQ ID NO: 198 - protein, 255 aa, Plasmodium falciparum
MVHVRVLKYPHNILFTNLTNDLFTYLPKTYNESNFVSNVLEVELNDGELFVLACELINKKCFQEGKEKALYKSNKIIYHKNLTIFKAPFYVTSKDVNTECTCKFKNNNYKIVLKPKYEKKVIHGCNFSSNVSSKHTFTDSLDISLVDDSAHISCNVHLSEPKYNHLVGLNCPGDIIPDCFFQVYQPESEELEPSNIVYLDSQINIGDIEYYEDAEGDDKIKLFGIVGSIPKTTSFTCICKKDKKSAYMTVTIDSA

SEQ ID NO: 199 - DNA, 1425 bp, Plasmodium falciparum
ggaggttcttatccatataagtctggtgagtatagaactaagtctttctttggatatggttattatgaagttaggatgaaggctgcaaagaacgttggaattgtttcttctttctttacttatactggaccatctgataacaacccatgggatgagattgatattgagtttcttggaaaggatactactaaggttcaattcaactggtataagaatggtgttggtggaaacgagtatcttcataaccttggatttgatgcttctcaagattttcatacttatggttttgagtggagaccagattatattgatttttatgttgatggaaagaaggtttatagaggtactagaaacattccagttactcctggaaagattatgatgaatctttggccaggaattggtgttgatgaatggcttggtagatatgatggaagaactccacttcaagctgagtatgagtatgttaagtattatccaaacggtagatctatggttcatgtgagggtgttgaagtacccacacaacattcttttcactaaccttactaacgatcttttcacttacttgccaaagacttacaacgagtctaacttcgtgtctaacgtgcttgaggtggagcttaatgatggtgagttgttcgttcttgcttgcgagcttattaacaagaagtgtttccaagagggaaaagagaaggctctttacaagtctaacaagattatttaccacaagaaccttactattttcaaggctccattctacgtgacttctaaggatgtgaacactgagtgcacttgcaagttcaagaacaacaactacaagattgtgcttaagccaaagtacgagaagaaagtgattcacggatgcaacttctcatctaacgtgtcatctaagcacactttcactgattctcttgatatttctcttgtggatgattctgctcacatttcttgcaacgtgcacctttctgagccaaagtacaaccaccttgtgggacttaattgcccaggtgatattattccagattgcttcttccaggtttaccaaccagagtctgaagaacttgagccatctaacattgtgtaccttgattctcagattaacattggagatattgagtactacgaggatgctgagggtgatgataagattaagttgttcggaattgtgggatctattccaaagactacttctttcacttgcatctgcaagaaggataagaaatctgcttacatgactgtgactattgattcagctaagcttgttgttaatactccatttgttgctgttttctctaactttgattcttctcaatgggaaaaggctgattgggctaacggttctgtttttaactgtgtttggaagccatctcaagttactttttctaacggaaagatgattcttactttggatagagagtatgtc

SEQ ID NO: 200 - protein, 476 aa, Plasmodium falciparum
QNGGSYPYKSGEYRTKSFFGYGYYEVRMKAAKNVGIVSSFFTYTGPSDNNPWDEIDIEFLGKDTTKVQFNWYKNGVGGNEYLHNLGFDASQDFHTYGFEWRPDYIDFYVDGKKVYRGTRNIPVTPGKIMMNLWPGIGVDEWLGRYDGRTPLQAEYEYVKYYPNGRSMVHVRVLKYPHNILFTNLTNDLFTYLPKTYNESNFVSNVLEVELNDGELFVLACELINKKCFQEGKEKALYKSNKIIYHKNLTIFKAPFYVTSKDVNTECTCKFKNNNYKIVLKPKYEKKVIHGCNFSSNVSSKHTFTDSLDISLVDDSAHISCNVHLSEPKYNHLVGLNCPGDIIPDCFFQVYQPESEELEPSNIVYLDSQINIGDIEYYEDAEGDDKIKLFGIVGSIPKTTSFTCICKKDKKSAYMTVTIDSAKLVVNTPFVAVFSNFDSSQWEKADWANGSVFNCVWKPSQVTFSNGKMILTLDREY

SEQ ID NO: 201 - DNA, 1683 bp, Plasmodium falciparum; identical to SEQ ID NO: 94

SEQ ID NO: 202 - protein, 550 aa, Plasmodium falciparum
QNGGSYPYKSGEYRTKSFFGYGYYEVRMKAAKNVGIVSSFFTYTGPSDNNPWDEIDIEFLGKDTTKVQFNWYKNGVGGNEYLHNLGFDASQDFHTYGFEWRPDYIDFYVDGKKVYRGTRNIPVTPGKIMMNLWPGIGVDEWLGRYDGRTPLQAEYEYVKYYPNGRSNNTNKEYVCDFTDQLKPTESGPKVKKCEVKVNEPLIKVKIICPLKGSVEKLYDNIEYVPKKSPYVVLTKEETKLKEKLLSKLIYGLLISPTVNEKENNFKEGVIEFTLPPVVHKATVFYFICDNSKTEDDNKKGNRGIVEVYVEPYGNKINGCAFLDEDEEEEKYGNQIEEDEHNEKIKMKTFFTQNIYKKNNIYPCYMKLYSGDIGGILFPKNIKSTTCFEEMIPYNKEIKWNKENKSLGNLVNNSVVYNKEMNAKYFNVQYVHIPTSYKDTLNLFCSIILKEEESNLISTSYLVYVSINEELQFSLFDFYESFVPIKKTIQVAQKNVKLVVNTPFVAVFSNFDSSQWEKADWANGSVFNCVWKPSQVTFSNGKMILTLDREY

SEQ ID NO: 203 - DNA, 1656 bp, Plasmodium falciparum
ggaggttcttatccatataagtctggtgagtatagaactaagtctttctttggatatggttattatgaagttaggatgaaggctgcaaagaacgttggaattgtttcttctttctttacttatactggaccatctgataacaacccatgggatgagattgatattgagtttcttggaaaggatactactaaggttcaattcaactggtataagaatggtgttggtggaaacgagtatcttcataaccttggatttgatgcttctcaagattttcatacttatggttttgagtggagaccagattatattgatttttatgttgatggaaagaaggtttatagaggtactagaaacattccagttactcctggaaagattatgatgaatctttggccaggaattggtgttgatgaatggcttggtagatatgatggaagaactccacttcaagctgagtatgagtatgttaagtattatccaaacggtagatctgaattcaagcttgttgttaatactccatttgttgctgttttctctaactttgattcttctcaatgggaaaaggctgattgggctaacggttctgtttttaactgtgtttggaagccatctcaagttactttttctaacggaaagatgattcttactttggatagagagtatgtcgacaacaacactaacaaagagtatgtttgcgatttcactgatcagcttaagccaactgagtctggaccaaaggttaagaagtgcgaggttaaggttaacgagccacttattaaggtgaagattatttgcccacttaagggatctgtggagaagttgtacgataacattgagtacgtgccaaagaagtctccatacgttgttcttacaaaagaagagactaagttgaaagagaagttgctttctaagttgatttacggacttcttatttctccaactgtgaacgagaaagagaacaacttcaaagagggtgttattgagttcactcttccaccagttgttcacaaggctactgtgttctacttcatttgcgataactctaagactgaggatgataacaagaagggaaacaggggtattgtggaggtttacgtggagccatacggaaacaagattaacggatgcgctttccttgatgaggatgaagaggaagagaagtacggaaaccagattgaagaggatgagcacaacgagaagattaagatgaaaactttcttcactcagaacatttacaagaagaacaacatttacccatgctacatgaagttgtactctggtgatattggaggaattcttttcccaaagaacattaagtctactacttgcttcgaagagatgattccatacaacaaagagattaagtggaacaaagagaacaagtctcttggaaacttggtgaacaactctgtggtgtataacaaagagatgaacgctaagtacttcaacgttcagtacgtgcacattccaacttcatacaaggatactcttaaccttttttgttctattattcttaaagaggaagagtctaaccttatttctacttcttaccttgtgtacgtttctattaacgaagagcttcaattctctcttttcgatttctacgagtctttcgtgcctattaagaaaactattcaggtggcacagaagaacgtt

SEQ ID NO: 204 - protein, 554 aa, Plasmodium falciparum
QNGGSYPYKSGEYRTKSFFGYGYYEVRMKAAKNVGIVSSFFTYTGPSDNNPWDEIDIEFLGKDTTKVQFNWYKNGVGGNEYLHNLGFDASQDFHTYGFEWRPDYIDFYVDGKKVYRGTRNIPVTPGKIMMNLWPGIGVDEWLGRYDGRTPLQAEYEYVKYYPNGRSEFKLVVNTPFVAVFSNFDSSQWEKADWANGSVFNCVWKPSQVTFSNGKMILTLDREYVDNNTNKEYVCDFTDQLKPTESGPKVKKCEVKVNEPLIKVKIICPLKGSVEKLYDNIEYVPKKSPYVVLTKEETKLKEKLLSKLIYGLLISPTVNEKENNFKEGVIEFTLPPVVHKATVFYFICDNSKTEDDNKKGNRGIVEVYVEPYGNKINGCAFLDEDEEEEKYGNQIEEDEHNEKIKMKTFFTQNIYKKNNIYPCYMKLYSGDIGGILFPKNIKSTTCFEEMIPYNKEIKWNKENKSLGNLVNNSVVYNKEMNAKYFNVQYVHIPTSYKDTLNLFCSIILKEEESNLISTSYLVYVSINEELQFSLFDFYESFVPIKKTIQVAQKNV

SEQ ID NO: 205 - DNA, 1785 bp, Plasmodium falciparum
ggaggttcttatccatataagtctggtgagtatagaactaagtctttctttggatatggttattatgaagttaggatgaaggctgcaaagaacgttggaattgtttcttctttctttacttatactggaccatctgataacaacccatgggatgagattgatattgagtttcttggaaaggatactactaaggttcaattcaactggtataagaatggtgttggtggaaacgagtatcttcataaccttggatttgatgcttctcaagattttcatacttatggttttgagtggagaccagattatattgatttttatgttgatggaaagaaggtttatagaggtactagaaacattccagttactcctggaaagattatgatgaatctttggccaggaattggtgttgatgaatggcttggtagatatgatggaagaactccacttcaagctgagtatgagtatgttaagtattatccaaacggtagatctaacaacaaagagcacgattacacttgcgatttcactgataagttggataagactgtgccatctactgctaacggaaagaagttgttcatctgtaggaagcaccttaaagagttcgatactttcactcttaagtgcaacgtgcaaaagactcagtacccaaacattgagattttcccaaagactcttaaggataagaaagaggtgttgaagttggatcttgatattcagtaccagatgttctctaagttcttcaagttcaacactcagaacgctaagtaccttaacctttacccttactaccttattttcccattcaaccacattggaaagaaagagcttaagaacaacccaacttacaagaaccacaaggatgtgaagtacttcgagcagagttctgtgctttctcctctttcttctgctgattctcttggaaagttgcttaacttccttgatactcaagagactgtgtgccttactgagaagattagataccttcaactttctattaacgagcttggatctgataacaacactttctctgtgactttccaggtgccaccttacattgatattaaggaaccattctacttcatgttcggatgcaacaacaacaagggagagggaaacattggaattgtggagcttttgatttctaagcaggaagagaagattaagggatgcaacttccacgagtctaagttggattacttcaacgagcagatttcttctgatactcacgagtgcactcttcatgcttacgagaacgatattattggattcaactgccttgagactactcatccaaacgaggttgaagttgaggttgaggatgctgagatttaccttcaaccagagaactgcttcaacaacgtgtacaagggacttaactctgtggatattactactattcttaagaacgctcagacttacaacattaacaacaagaaaactccaactttccttaagattccaccatacaaccttttggaggatgtggagatttcttgccagtgcactattaagcaggtggtgaaaaagatcaaagtgattattactaagaacgatactgtgcttcttaagagagaggttcagtctgagtctactcttgatgataagatttacaagaagcttgttgttaatactccatttgttgctgttttctctaactttgattcttctcaatgggaaaaggctgattgggctaacggttctgtttttaactgtgtttggaagccatctcaagttactttttctaacggaaagatgattcttactttggatagagagtatgtc

SEQ ID NO: 206 - protein, 596 aa, Plasmodium falciparum
QNGGSYPYKSGEYRTKSFFGYGYYEVRMKAAKNVGIVSSFFTYTGPSDNNPWDEIDIEFLGKDTTKVQFNWYKNGVGGNEYLHNLGFDASQDFHTYGFEWRPDYIDFYVDGKKVYRGTRNIPVTPGKIMMNLWPGIGVDEWLGRYDGRTPLQAEYEYVKYYPNGRSNNKEHDYTCDFTDKLDKTVPSTANGKKLFICRKHLKEFDTFTLKCNVQKTQYPNIEIFPKTLKDKKEVLKLDLDIQYQMFSKFFKFNTQNAKYLNLYPYYLIFPFNHIGKKELKNNPTYKNHKDVKYFEQSSVLSPLSSADSLGKLLNFLDTQETVCLTEKIRYLQLSINELGSDNNTFSVTFQVPPYIDIKEPFYFMFGCNNNKGEGNIGIVELLISKQEEKIKGCNFHESKLDYFNEQISSDTHECTLHAYENDIIGFNCLETTHPNEVEVEVEDAEIYLQPENCFNNVYKGLNSVDITTILKNAQTYNINNKKTPTFLKIPPYNLLEDVEISCQCTIKQVVKKIKVIITKNDTVLLKREVQSESTLDDKIYKKLVVNTPFVAVFSNFDSSQWEKADWANGSVFNCVWKPSQVTFSNGKMILTLDREY

SEQ ID NO: 207 - DNA, 1794 bp, Plasmodium falciparum
ggaggttcttatccatataagtctggtgagtatagaactaagtctttctttggatatggttattatgaagttaggatgaaggctgcaaagaacgttggaattgtttcttctttctttacttatactggaccatctgataacaacccatgggatgagattgatattgagtttcttggaaaggatactactaaggttcaattcaactggtataagaatggtgttggtggaaacgagtatcttcataaccttggatttgatgcttctcaagattttcatacttatggttttgagtggagaccagattatattgatttttatgttgatggaaagaaggtttatagaggtactagaaacattccagttactcctggaaagattatgatgaatctttggccaggaattggtgttgatgaatggcttggtagatatgatggaagaactccacttcaagctgagtatgagtatgttaagtattatccaaacggtagatctgaattcaagcttgttgttaatactccatttgttgctgttttctctaactttgattcttctcaatgggaaaaggctgattgggctaacggttctgtttttaactgtgtttggaagccatctcaagttactttttctaacggaaagatgattcttactttggatagagagtatgtcgacaacaacaaagagcacgattacacttgcgatttcactgataagttggataagactgtgccatctactgctaacggaaagaagttgttcatctgtaggaagcaccttaaagagttcgatactttcactcttaagtgcaacgtgcaaaagactcagtacccaaacattgagattttcccaaagactcttaaggataagaaagaggtgttgaagttggatcttgatattcagtaccagatgttctctaagttcttcaagttcaacactcagaacgctaagtaccttaacctttacccttactaccttattttcccattcaaccacattggaaagaaagagcttaagaacaacccaacttacaagaaccacaaggatgtgaagtacttcgagcagagttctgtgctttctcctctttcttctgctgattctcttggaaagttgcttaacttccttgatactcaagagactgtgtgccttactgagaagattagataccttcaactttctattaacgagcttggatctgataacaacactttctctgtgactttccaggtgccaccttacattgatattaaggaaccattctacttcatgttcggatgcaacaacaacaagggagagggaaacattggaattgtggagcttttgatttctaagcaggaagagaagattaagggatgcaacttccacgagtctaagttggattacttcaacgagcagatttcttctgatactcacgagtgcactcttcatgcttacgagaacgatattattggattcaactgccttgagactactcatccaaacgaggttgaagttgaggttgaggatgctgagatttaccttcaaccagagaactgcttcaacaacgtgtacaagggacttaactctgtggatattactactattcttaagaacgctcagacttacaacattaacaacaagaaaactccaactttccttaagattccaccatacaaccttttggaggatgtggagatttcttgccagtgcactattaagcaggtggtgaaaaagatcaaagtgattattactaagaacgatactgtgcttcttaagagagaggttcagtctgagtctactcttgatgataagatttacaag

SEQ ID NO: 208 - protein, 600 aa, Plasmodium falciparum
QNGGSYPYKSGEYRTKSFFGYGYYEVRMKAAKNVGIVSSFFTYTGPSDNNPWDEIDIEFLGKDTTKVQFNWYKNGVGGNEYLHNLGFDASQDFHTYGFEWRPDYIDFYVDGKKVYRGTRNIPVTPGKIMMNLWPGIGVDEWLGRYDGRTPLQAEYEYVKYYPNGRSEFKLVVNTPFVAVFSNFDSSQWEKADWANGSVFNCVWKPSQVTFSNGKMILTLDREYVDNNKEHDYTCDFTDKLDKTVPSTANGKKLFICRKHLKEFDTFTLKCNVQKTQYPNIEIFPKTLKDKKEVLKLDLDIQYQMFSKFFKFNTQNAKYLNLYPYYLIFPFNHIGKKELKNNPTYKNHKDVKYFEQSSVLSPLSSADSLGKLLNFLDTQETVCLTEKIRYLQLSINELGSDNNTFSVTFQVPPYIDIKEPFYFMFGCNNNKGEGNIGIVELLISKQEEKIKGCNFHESKLDYFNEQISSDTHECTLHAYENDIIGFNCLETTHPNEVEVEVEDAEIYLQPENCFNNVYKGLNSVDITTILKNAQTYNINNKKTPTFLKIPPYNLLEDVEISCQCTIKQVVKKIKVIITKNDTVLLKREVQSESTLDDKIYK

SEQ ID NO: 209 - DNA, 1890 bp, Plasmodium falciparum
ggaggttcttatccatataagtctggtgagtatagaactaagtctttctttggatatggttattatgaagttaggatgaaggctgcaaagaacgttggaattgtttcttctttctttacttatactggaccatctgataacaacccatgggatgagattgatattgagtttcttggaaaggatactactaaggttcaattcaactggtataagaatggtgttggtggaaacgagtatcttcataaccttggatttgatgcttctcaagattttcatacttatggttttgagtggagaccagattatattgatttttatgttgatggaaagaaggtttatagaggtactagaaacattccagttactcctggaaagattatgatgaatctttggccaggaattggtgttgatgaatggcttggtagatatgatggaagaactccacttcaagctgagtatgagtatgttaagtattatccaaacggtagatctggtaccagatcttgcgagcacgagaacttcattaacccaagggtgcaaaagactttcgatgagaacgtggagtacacttgcaacattaagattgagaatttcttcaactacattcagattttctgcccagctaaggatcttggtatttacaagaacattcagatgtactacgatattgtgaagccaactagggttccacagttcaagaagttcaacaacgaagagcttcacaagttgattccaaactctgagatgcttcacaagacaaaagagatgcttattctttacaacgaagagaaagtggatcttcttcacttctacgtgttccttcctatttacattaaggatatttacgagttcaacattgtgtgcgataactctaagactatgtggaagaaccagcttggaggaaaagtgatttaccacattactgtgtctaagagggaacagaaagtgaagggctgttctttcgataatgagcacgctcacatgttctcttaccaaaagactaacgtgaagaactgcattattgatgcaaagccaaaggatcttattggatttgtgtgcccatctggaactcttaagttgactaactgcttcaaggatgctattgtgcacactcagcttactaacattaacggaattctttaccttaagaacaaccttgctaacttcacttacaagcaccagttcaactacatggaaattccagctcttatggataacgatatttctttcaagtgcatttgcgtggatcttaagaagaagaagtacaacgttaagtctccacttggaccaaaggttttgagggctctttacaagaagttgaacattaagttcgataactacgtgactggaactgatcagaacaagtaccttatgacttacatggatcttcacctttctcacaagaggaactaccttaaagagcttttccacgatcttggaaagaaaaagccagctgatactgatgctaacccagagtctattattgagtctctttctattaacgagtcaaacgagtctggaccattcccaactggtgatgtggatgctgaacaccttattcttgagggatacgatacttgggagtctctttacgatgagcagcttgaggaagttatttacaacgatattgagtcattggagttgaaggatattgagcagtacgtgttgcaagttaaccttaaggcacctaagttgatgatgtctgctcagattcacaagcttgttgttaatactccatttgttgctgttttctctaactttgattcttctcaatgggaaaaggctgattgggctaacggttctgtttttaactgtgtttggaagccatctcaagttactttttctaacggaaagatgattcttactttggatagagagtatgtcgacgtc

SEQ ID NO: 210 - protein, 631 aa, Plasmodium falciparum
QNGGSYPYKSGEYRTKSFFGYGYYEVRMKAAKNVGIVSSFFTYTGPSDNNPWDEIDIEFLGKDTTKVQFNWYKNGVGGNEYLHNLGFDASQDFHTYGFEWRPDYIDFYVDGKKVYRGTRNIPVTPGKIMMNLWPGIGVDEWLGRYDGRTPLQAEYEYVKYYPNGRSGTRSCEHENFINPRVQKTFDENVEYTCNIKIENFFNYIQIFCPAKDLGIYKNIQMYYDIVKPTRVPQFKKFNNEELHKLIPNSEMLHKTKEMLILYNEEKVDLLHFYVFLPIYIKDIYEFNIVCDNSKTMWKNQLGGKVIYHITVSKREQKVKGCSFDNEHAHMFSYQKTNVKNCIIDAKPKDLIGFVCPSGTLKLTNCFKDAIVHTQLTNINGILYLKNNLANFTYKHQFNYMEIPALMDNDISFKCICVDLKKKKYNVKSPLGPKVLRALYKKLNIKFDNYVTGTDQNKYLMTYMDLHLSHKRNYLKELFHDLGKKKPADTDANPESIIESLSINESNESGPFPTGDVDAEHLILEGYDTWESLYDEQLEEVIYNDIESLELKDIEQYVLQVNLKAPKLMMSAQIHKLVVNTPFVAVFSNFDSSQWEKADWANGSVFNCVWKPSQVTFSNGKMILTLDREYVD

SEQ ID NO: 211 - DNA, 1893 bp, Plasmodium falciparum
ggaggttcttatccatataagtctggtgagtatagaactaagtctttctttggatatggttattatgaagttaggatgaaggctgcaaagaacgttggaattgtttcttctttctttacttatactggaccatctgataacaacccatgggatgagattgatattgagtttcttggaaaggatactactaaggttcaattcaactggtataagaatggtgttggtggaaacgagtatcttcataaccttggatttgatgcttctcaagattttcatacttatggttttgagtggagaccagattatattgatttttatgttgatggaaagaaggtttatagaggtactagaaacattccagttactcctggaaagattatgatgaatctttggccaggaattggtgttgatgaatggcttggtagatatgatggaagaactccacttcaagctgagtatgagtatgttaagtattatccaaacggtagatctgaattcaagcttgttgttaatactccatttgttgctgttttctctaactttgattcttctcaatgggaaaaggctgattgggctaacggttctgtttttaactgtgtttggaagccatctcaagttactttttctaacggaaagatgattcttactttggatagagagtatgtcgacggtaccagatcttgcgagcacgagaacttcattaacccaagggtgcaaaagactttcgatgagaacgtggagtacacttgcaacattaagattgagaatttcttcaactacattcagattttctgcccagctaaggatcttggtatttacaagaacattcagatgtactacgatattgtgaagccaactagggttccacagttcaagaagttcaacaacgaagagcttcacaagttgattccaaactctgagatgcttcacaagacaaaagagatgcttattctttacaacgaagagaaagtggatcttcttcacttctacgtgttccttcctatttacattaaggatatttacgagttcaacattgtgtgcgataactctaagactatgtggaagaaccagcttggaggaaaagtgatttaccacattactgtgtctaagagggaacagaaagtgaagggctgttctttcgataatgagcacgctcacatgttctcttaccaaaagactaacgtgaagaactgcattattgatgcaaagccaaaggatcttattggatttgtgtgcccatctggaactcttaagttgactaactgcttcaaggatgctattgtgcacactcagcttactaacattaacggaattctttaccttaagaacaaccttgctaacttcacttacaagcaccagttcaactacatggaaattccagctcttatggataacgatatttctttcaagtgcatttgcgtggatcttaagaagaagaagtacaacgttaagtctccacttggaccaaaggttttgagggctctttacaagaagttgaacattaagttcgataactacgtgactggaactgatcagaacaagtaccttatgacttacatggatcttcacctttctcacaagaggaactaccttaaagagcttttccacgatcttggaaagaaaaagccagctgatactgatgctaacccagagtctattattgagtctctttctattaacgagtcaaacgagtctggaccattcccaactggtgatgtggatgctgaacaccttattcttgagggatacgatacttgggagtctctttacgatgagcagcttgaggaagttatttacaacgatattgagtcattggagttgaaggatattgagcagtacgtgttgcaagttaaccttaaggcacctaagttgatgatgtctgctcagattcac

SEQ ID NO: 212 - protein, 633 aa, Plasmodium falciparum
QNGGSYPYKSGEYRTKSFFGYGYYEVRMKAAKNVGIVSSFFTYTGPSDNNPWDEIDIEFLGKDTTKVQFNWYKNGVGGNEYLHNLGFDASQDFHTYGFEWRPDYIDFYVDGKKVYRGTRNIPVTPGKIMMNLWPGIGVDEWLGRYDGRTPLQAEYEYVKYYPNGRSEFKLVVNTPFVAVFSNFDSSQWEKADWANGSVFNCVWKPSQVTFSNGKMILTLDREYVDGTRSCEHENFINPRVQKTFDENVEYTCNIKIENFFNYIQIFCPAKDLGIYKNIQMYYDIVKPTRVPQFKKFNNEELHKLIPNSEMLHKTKEMLILYNEEKVDLLHFYVFLPIYIKDIYEFNIVCDNSKTMWKNQLGGKVIYHITVSKREQKVKGCSFDNEHAHMFSYQKTNVKNCIIDAKPKDLIGFVCPSGTLKLTNCFKDAIVHTQLTNINGILYLKNNLANFTYKHQFNYMEIPALMDNDISFKCICVDLKKKKYNVKSPLGPKVLRALYKKLNIKFDNYVTGTDQNKYLMTYMDLHLSHKRNYLKELFHDLGKKKPADTDANPESIIESLSINESNESGPFPTGDVDAEHLILEGYDTWESLYDEQLEEVIYNDIESLELKDIEQYVLQVNLKAPKLMMSAQIH

SEQ ID NO: 213 - DNA, 1740 bp, Plasmodium falciparum
ggaggttcttatccatataagtctggtgagtatagaactaagtctttctttggatatggttattatgaagttaggatgaaggctgcaaagaacgttggaattgtttcttctttctttacttatactggaccatctgataacaacccatgggatgagattgatattgagtttcttggaaaggatactactaaggttcaattcaactggtataagaatggtgttggtggaaacgagtatcttcataaccttggatttgatgcttctcaagattttcatacttatggttttgagtggagaccagattatattgatttttatgttgatggaaagaaggtttatagaggtactagaaacattccagttactcctggaaagattatgatgaatctttggccaggaattggtgttgatgaatggcttggtagatatgatggaagaactccacttcaagctgagtatgagtatgttaagtattatccaaacggtagatctaacaacaggcatgtgtgcgatttctctaagaacaaccttattgtgccagagtctcttaagaagaaagaagagcttggaggaaacccagttaacattcactgctacgctttgcttaagccacttgatacactttacgtgaagtgcccaacttctaaggataactacgaggctgctaaggtgaacatttctgagaacgataacgagtacgagcttcaagtgatttctcttattgagaagaggttccacaacttcgagactcttgagtctaaaaagcctggaaacggtgatgttgttgtgcacaacggtgttgttgatactggaccagtgcttgataactctactttcgagaagtacttcaagaacattaagattaagccagataagttcttcgagaaagtgattaacgagtatgatgatactgaggaagagaaggatcttgagtctattcttccaggtgctattgtgtctccaatgaaggtgttgaagaagaaagatcctttcacttcttacgctgctttcgtggttccaccaattgtgccaaaggatcttcacttcaaggtggagtgcaacaacactgagtacaaggatgagaaccagtacatttctggatacaacggaattattcacattgatatttctaactctaacaggaagattaacggttgcgatttctcaactaacaactcttctattcttacttcttctgtgaagttggtgaacggtgaaactaagaactgcgagattaacattaacaacaacgaggtgttcggaattatttgcgataacgagactaaccttgatccagagaagtgcttccacgagatttactctaaggatcaaaagactgtgaagaagttcagggaagttattccaaatattgatattttctctcttcacaactcaaacaagaagaaggttgcatacgctaaggtgccacttgattacattaacaagttgcttttctcttgttcttgcaagacttctcacactaacactattggaactatgaaggtgacacttaataaggatgagaaagaggaagaggatttcaagactgctcagggtattaagcacgaattcaagcttgttgttaatactccatttgttgctgttttctctaactttgattcttctcaatgggaaaaggctgattgggctaacggttctgtttttaactgtgtttggaagccatctcaagttactttttctaacggaaagatgattcttactttggatagagagtatgtc

SEQ ID NO: 214 - protein, 581 aa, Plasmodium falciparum
QNGGSYPYKSGEYRTKSFFGYGYYEVRMKAAKNVGIVSSFFTYTGPSDNNPWDEIDIEFLGKDTTKVQFNWYKNGVGGNEYLHNLGFDASQDFHTYGFEWRPDYIDFYVDGKKVYRGTRNIPVTPGKIMMNLWPGIGVDEWLGRYDGRTPLQAEYEYVKYYPNGRSNNRHVCDFSKNNLIVPESLKKKEELGGNPVNIHCYALLKPLDTLYVKCPTSKDNYEAAKVNISENDNEYELQVISLIEKRFHNFETLESKKPGNGDVVVHNGVVDTGPVLDNSTFEKYFKNIKIKPDKFFEKVINEYDDTEEEKDLESILPGAIVSPMKVLKKKDPFTSYAAFVVPPIVPKDLHFKVECNNTEYKDENQYISGYNGIIHIDISNSNRKINGCDFSTNNSSILTSSVKLVNGETKNCEININNNEVFGIICDNETNLDPEKCFHEIYSKDQKTVKKFREVIPNIDIFSLHNSNKKKVAYAKVPLDYINKLLFSCSCKTSHTNTIGTMKVTLNKDEKEEEDFKTAQGIKHEFKLVVNTPFVAVFSNFDSSQWEKADWANGSVFNCVWKPSQVTFSNGKMILTLDREY

SEQ ID NO: 215 - DNA, 1743 bp, Plasmodium falciparum
ggaggttcttatccatataagtctggtgagtatagaactaagtctttctttggatatggttattatgaagttaggatgaaggctgcaaagaacgttggaattgtttcttctttctttacttatactggaccatctgataacaacccatgggatgagattgatattgagtttcttggaaaggatactactaaggttcaattcaactggtataagaatggtgttggtggaaacgagtatcttcataaccttggatttgatgcttctcaagattttcatacttatggttttgagtggagaccagattatattgatttttatgttgatggaaagaaggtttatagaggtactagaaacattccagttactcctggaaagattatgatgaatctttggccaggaattggtgttgatgaatggcttggtagatatgatggaagaactccacttcaagctgagtatgagtatgttaagtattatccaaacggtagatctgaattcaagcttgttgttaatactccatttgttgctgttttctctaactttgattcttctcaatgggaaaaggctgattgggctaacggttctgtttttaactgtgtttggaagccatctcaagttactttttctaacggaaagatgattcttactttggatagagagtatgtcgacaacaacaggcatgtgtgcgatttctctaagaacaaccttattgtgccagagtctcttaagaagaaagaagagcttggaggaaacccagttaacattcactgctacgctttgcttaagccacttgatacactttacgtgaagtgcccaacttctaaggataactacgaggctgctaaggtgaacatttctgagaacgataacgagtacgagcttcaagtgatttctcttattgagaagaggttccacaacttcgagactcttgagtctaaaaagcctggaaacggtgatgttgttgtgcacaacggtgttgttgatactggaccagtgcttgataactctactttcgagaagtacttcaagaacattaagattaagccagataagttcttcgagaaagtgattaacgagtatgatgatactgaggaagagaaggatcttgagtctattcttccaggtgctattgtgtctccaatgaaggtgttgaagaagaaagatcctttcacttcttacgctgctttcgtggttccaccaattgtgccaaaggatcttcacttcaaggtggagtgcaacaacactgagtacaaggatgagaaccagtacatttctggatacaacggaattattcacattgatatttctaactctaacaggaagattaacggttgcgatttctcaactaacaactcttctattcttacttcttctgtgaagttggtgaacggtgaaactaagaactgcgagattaacattaacaacaacgaggtgttcggaattatttgcgataacgagactaaccttgatccagagaagtgcttccacgagatttactctaaggatcaaaagactgtgaagaagttcagggaagttattccaaatattgatattttctctcttcacaactcaaacaagaagaaggttgcatacgctaaggtgccacttgattacattaacaagttgcttttctcttgttcttgcaagacttctcacactaacactattggaactatgaaggtgacacttaataaggatgagaaagaggaagaggatttcaagactgctcagggtattaagcac

SEQ ID NO: 216 - protein, 583 aa, Plasmodium falciparum
QNGGSYPYKSGEYRTKSFFGYGYYEVRMKAAKNVGIVSSFFTYTGPSDNNPWDEIDIEFLGKDTTKVQFNWYKNGVGGNEYLHNLGFDASQDFHTYGFEWRPDYIDFYVDGKKVYRGTRNIPVTPGKIMMNLWPGIGVDEWLGRYDGRTPLQAEYEYVKYYPNGRSEFKLVVNTPFVAVFSNFDSSQWEKADWANGSVFNCVWKPSQVTFSNGKMILTLDREYVDNNRHVCDFSKNNLIVPESLKKKEELGGNPVNIHCYALLKPLDTLYVKCPTSKDNYEAAKVNISENDNEYELQVISLIEKRFHNFETLESKKPGNGDVVVHNGVVDTGPVLDNSTFEKYFKNIKIKPDKFFEKVINEYDDTEEEKDLESILPGAIVSPMKVLKKKDPFTSYAAFVVPPIVPKDLHFKVECNNTEYKDENQYISGYNGIIHIDISNSNRKINGCDFSTNNSSILTSSVKLVNGETKNCEININNNEVFGIICDNETNLDPEKCFHEIYSKDQKTVKKFREVIPNIDIFSLHNSNKKKVAYAKVPLDYINKLLFSCSCKTSHTNTIGTMKVTLNKDEKEEEDFKTAQGIKH

SEQ ID NO: 217 - DNA, 1857 bp, Plasmodium falciparum
ggaggttcttatccatataagtctggtgagtatagaactaagtctttctttggatatggttattatgaagttaggatgaaggctgcaaagaacgttggaattgtttcttctttctttacttatactggaccatctgataacaacccatgggatgagattgatattgagtttcttggaaaggatactactaaggttcaattcaactggtataagaatggtgttggtggaaacgagtatcttcataaccttggatttgatgcttctcaagattttcatacttatggttttgagtggagaccagattatattgatttttatgttgatggaaagaaggtttatagaggtactagaaacattccagttactcctggaaagattatgatgaatctttggccaggaattggtgttgatgaatggcttggtagatatgatggaagaactccacttcaagctgagtatgagtatgttaagtattatccaaacggtagatctaacaacgtgcacttgtgcaatttcttcgataacccagagcttactttcgataacaacaagattgtgttgtgcaagattgatgctgagttgttctctgaagtgattattcagcttccaattttcggaactaagaacgtggaagagggtgttcagaacgaagagtacaagaagttctctcttaagccatctcttgtgttcgatgataacaacaacgatattaaggtgatcggaaaagagaagaacgaggtttcaatttctcttgctcttaagggagtgtacggaaacaggattttcactttcgataagaacggaaagaagggtgaaggtattagtttcttcattccacctattaagcaggatactgatcttaagttcattattaacgagactattgataactctaacattaagcagcgtggacttatttacatttttgtgaggaagaacgtgtctgagaactctttcaagttgtgcgatttcactactggatctacttctcttatggaacttaactctcaggtgaaagaaaagaagtgcactgttaagattaagaagggtgatattttcggacttaagtgcccaaagggattcgctattttcccacaggcttgcttctctaacgtgcttcttgagtactacaagtctgattacgaggattctgagcacattaactactacattcacaaggataagaagtacaaccttaagccaaaggatgtgattgagcttatggatgagaacttcagagagcttcaaaacattcagcagtacactggaatttctcagattactgatgtgcttcacttcaagaacttcaaccttggaaaccttccacttaacttcaagaaccactactctactgcttacgctaaggtgccagatactttcaactctattattaacttctcttgcaactgctacaatccagagaagcacgtgtacggaactatgcaagtggagtctgataacaggaacttcgataacattaagaagaacgagaacgttattaagaacttccttcttccaaacattgagaagtacgctttgcttcttgatgatgaagagaggcagaagaagattaagcagcagcaagaggaagaacagcaagagcagattcttaaggatcaggatgataggctttctaggcacgatgattacaacaagaaccacacttacattctttacgattctaacaagcttgttgttaatactccatttgttgctgttttctctaactttgattcttctcaatgggaaaaggctgattgggctaacggttctgtttttaactgtgtttggaagccatctcaagttactttttctaacggaaagatgattcttactttggatagagagtatgtcgac

SEQ ID NO: 218 - protein, 619 aa, Plasmodium falciparum
QNGGSYPYKSGEYRTKSFFGYGYYEVRMKAAKNVGIVSSFFTYTGPSDNNPWDEIDIEFLGKDTTKVQFNWYKNGVGGNEYLHNLGFDASQDFHTYGFEWRPDYIDFYVDGKKVYRGTRNIPVTPGKIMMNLWPGIGVDEWLGRYDGRTPLQAEYEYVKYYPNGRSNNVHLCNFFDNPELTFDNNKIVLCKIDAELFSEVIIQLPIFGTKNVEEGVQNEEYKKFSLKPSLVFDDNNNDIKVIGKEKNEVSISLALKGVYGNRIFTFDKNGKKGEGISFFIPPIKQDTDLKFIINETIDNSNIKQRGLIYIFVRKNVSENSFKLCDFTTGSTSLMELNSQVKEKKCTVKIKKGDIFGLKCPKGFAIFPQACFSNVLLEYYKSDYEDSEHINYYIHKDKKYNLKPKDVIELMDENFRELQNIQQYTGISQITDVLHFKNFNLGNLPLNFKNHYSTAYAKVPDTFNSIINFSCNCYNPEKHVYGTMQVESDNRNFDNIKKNENVIKNFLLPNIEKYALLLDDEERQKKIKQQQEEEQQEQILKDQDDRLSRHDDYNKNHTYILYDSNKLVVNTPFVAVFSNFDSSQWEKADWANGSVFNCVWKPSQVTFSNGKMILTLDREY

SEQ ID NO: 219 - DNA, 1863 bp, Plasmodium falciparum
ggaggttcttatccatataagtctggtgagtatagaactaagtctttctttggatatggttattatgaagttaggatgaaggctgcaaagaacgttggaattgtttcttctttctttacttatactggaccatctgataacaacccatgggatgagattgatattgagtttcttggaaaggatactactaaggttcaattcaactggtataagaatggtgttggtggaaacgagtatcttcataaccttggatttgatgcttctcaagattttcatacttatggttttgagtggagaccagattatattgatttttatgttgatggaaagaaggtttatagaggtactagaaacattccagttactcctggaaagattatgatgaatctttggccaggaattggtgttgatgaatggcttggtagatatgatggaagaactccacttcaagctgagtatgagtatgttaagtattatccaaacggtagatctgaattcaagcttgttgttaatactccatttgttgctgttttctctaactttgattcttctcaatgggaaaaggctgattgggctaacggttctgtttttaactgtgtttggaagccatctcaagttactttttctaacggaaagatgattcttactttggatagagagtatgtcgacaacaacgtgcacttgtgcaatttcttcgataacccagagcttactttcgataacaacaagattgtgttgtgcaagattgatgctgagttgttctctgaagtgattattcagcttccaattttcggaactaagaacgtggaagagggtgttcagaacgaagagtacaagaagttctctcttaagccatctcttgtgttcgatgataacaacaacgatattaaggtgatcggaaaagagaagaacgaggtttcaatttctcttgctcttaagggagtgtacggaaacaggattttcactttcgataagaacggaaagaagggtgaaggtattagtttcttcattccacctattaagcaggatactgatcttaagttcattattaacgagactattgataactctaacattaagcagcgtggacttatttacatttttgtgaggaagaacgtgtctgagaactctttcaagttgtgcgatttcactactggatctacttctcttatggaacttaactctcaggtgaaagaaaagaagtgcactgttaagattaagaagggtgatattttcggacttaagtgcccaaagggattcgctattttcccacaggcttgcttctctaacgtgcttcttgagtactacaagtctgattacgaggattctgagcacattaactactacattcacaaggataagaagtacaaccttaagccaaaggatgtgattgagcttatggatgagaacttcagagagcttcaaaacattcagcagtacactggaatttctcagattactgatgtgcttcacttcaagaacttcaaccttggaaaccttccacttaacttcaagaaccactactctactgcttacgctaaggtgccagatactttcaactctattattaacttctcttgcaactgctacaatccagagaagcacgtgtacggaactatgcaagtggagtctgataacaggaacttcgataacattaagaagaacgagaacgttattaagaacttccttcttccaaacattgagaagtacgctttgcttcttgatgatgaagagaggcagaagaagattaagcagcagcaagaggaagaacagcaagagcagattcttaaggatcaggatgataggctttctaggcacgatgattacaacaagaaccacacttacattctttacgattctaac

SEQ ID NO: 220 - protein, 566 aa, Plasmodium falciparum
QNGGSYPYKSGEYRTKSFFGYGYYEVRMKAAKNVGIVSSFFTYTGPSDNNPWDEIDIEFLGKDTTKVQFNWYKNGVGGNEYLHNLGFDASQDFHTYGFEWRPDYIDFYVDGKKVYRGTRNIPVTPGKIMMNLWPGIGVDEWLGRYDGRTPLQAEYEYVKYYPNGRSVDNNVHLCNFFDNPELTFDNNKIVLCKIDAELFSEVIIQLPIFGTKNVEEGVQNEEYKKFSLKPSLVFDDNNNDIKVIGKEKNEVSISLALKGVYGNRIFTFDKNGKKGEGISFFIPPIKQDTDLKFIINETIDNSNIKQRGLIYIFVRKNVSENSFKLCDFTTGSTSLMELNSQVKEKKCTVKIKKGDIFGLKCPKGFAIFPQACFSNVLLEYYKSDYEDSEHINYYIHKDKKYNLKPKDVIELMDENFRELQNIQQYTGISQITDVLHFKNFNLGNLPLNFKNHYSTAYAKVPDTFNSIINFSCNCYNPEKHVYGTMQVESDNRNFDNIKKNENVIKNFLLPNIEKYALLLDDEERQKKIKQQQEEEQQEQILKDQDDRLSRHDDYNKNHTYILYDSN

SEQ ID NO: 221 - DNA, 1818 bp, Plasmodium falciparum
ggaggttcttatccatataagtctggtgagtatagaactaagtctttctttggatatggttattatgaagttaggatgaaggctgcaaagaacgttggaattgtttcttctttctttacttatactggaccatctgataacaacccatgggatgagattgatattgagtttcttggaaaggatactactaaggttcaattcaactggtataagaatggtgttggtggaaacgagtatcttcataaccttggatttgatgcttctcaagattttcatacttatggttttgagtggagaccagattatattgatttttatgttgatggaaagaaggtttatagaggtactagaaacattccagttactcctggaaagattatgatgaatctttggccaggaattggtgttgatgaatggcttggtagatatgatggaagaactccacttcaagctgagtatgagtatgttaagtattatccaaacggtagatctgagcacatttgcgattacgagaagaacgagtctcttatttctactcttccaaacgatacaaagaagattcagaagtctatctgcaagattaacgctaaggctcttgatgtggtgactattaagtgcccacacactaagaacttcactccaaaggattacttcccaaactcttctcttattactaacgataagaaaattgtgattactttcgataagaagaacttcgttacttacattgatccaactaagaaaactttctctcttaaggatatttacattcagtctttctacggtgtgtctcttgatcaccttaaccagattaaaaagattcacgaggaatgggatgatgtgcaccttttctacccaccacacaacgttcttcacaacgtggtgcttaacaaccacattgtgaacctttcttcagctcttgagggtgttcttttcatgaagtctaaggtgacaggtgatgagactgctactaagaagaacactactcttcctactgatggtgtgtcatctattcttattccaccatacgtgaaagaggatattactttccaccttttctgcggaaagtctactactaagaagccaaacaagaagaacacatctcttgctcttattcacattcacatttcttctaacaggaacattattcacggttgcgatttcctttaccttgagaaccagactaacgatgctatttctaataacaacaacaactcttactctattttcactcacaacaagaacactgagaacaaccttatttgcgatatttctcttattccaaagactgtgattggtattaagtgtcctaacaagaagttgaacccacagacttgcttcgatgaggtgtactacgtgaagcaagaggatgtgccatctaagactattactgctgataagtacaacactttctctaaggataagattggaaacattcttaagaacgctattagtattaacaacccagatgagaaggataacacttacacttaccttattcttccagagaagttcgaggaagagcttattgatacaaagaaagtgcttgcttgcacttgcgataacaagtacattattcacatgaagattgagaagtcaactatggataagattaagattgatgagaagaaaactattggaaaggatattaagcttgttgttaatactccatttgttgctgttttctctaactttgattcttctcaatgggaaaaggctgattgggctaacggttctgtttttaactgtgtttggaagccatctcaagttactttttctaacggaaagatgattcttactttggatagagagtatgtc

SEQ ID NO: 222 - protein, 607 aa, Plasmodium falciparum
QNGGSYPYKSGEYRTKSFFGYGYYEVRMKAAKNVGIVSSFFTYTGPSDNNPWDEIDIEFLGKDTTKVQFNWYKNGVGGNEYLHNLGFDASQDFHTYGFEWRPDYIDFYVDGKKVYRGTRNIPVTPGKIMMNLWPGIGVDEWLGRYDGRTPLQAEYEYVKYYPNGRSEHICDYEKNESLISTLPNDTKKIQKSICKINAKALDVVTIKCPHTKNFTPKDYFPNSSLITNDKKIVITFDKKNFVTYIDPTKKTFSLKDIYIQSFYGVSLDHLNQIKKIHEEWDDVHLFYPPHNVLHNVVLNNHIVNLSSALEGVLFMKSKVTGDETATKKNTTLPTDGVSSILIPPYVKEDITFHLFCGKSTTKKPNKKNTSLALIHIHISSNRNIIHGCDFLYLENQTNDAISNNNNNSYSIFTHNKNTENNLICDISLIPKTVIGIKCPNKKLNPQTCFDEVYYVKQEDVPSKTITADKYNTFSKDKIGNILKNAISINNPDEKDNTYTYLILPEKFEEELIDTKKVLACTCDNKYIIHMKIEKSTMDKIKIDEKKTIGKDIKLVVNTPFVAVFSNFDSSQWEKADWANGSVFNCVWKPSQVTFSNGKMILTLDREY

SEQ ID NO: 223 - DNA, 1827 bp, Plasmodium falciparum
ggaggttcttatccatataagtctggtgagtatagaactaagtctttctttggatatggttattatgaagttaggatgaaggctgcaaagaacgttggaattgtttcttctttctttacttatactggaccatctgataacaacccatgggatgagattgatattgagtttcttggaaaggatactactaaggttcaattcaactggtataagaatggtgttggtggaaacgagtatcttcataaccttggatttgatgcttctcaagattttcatacttatggttttgagtggagaccagattatattgatttttatgttgatggaaagaaggtttatagaggtactagaaacattccagttactcctggaaagattatgatgaatctttggccaggaattggtgttgatgaatggcttggtagatatgatggaagaactccacttcaagctgagtatgagtatgttaagtattatccaaacggtagatctgaattcaagcttgttgttaatactccatttgttgctgttttctctaactttgattcttctcaatgggaaaaggctgattgggctaacggttctgtttttaactgtgtttggaagccatctcaagttactttttctaacggaaagatgattcttactttggatagagagtatgtcgacgagcacatttgcgattacgagaagaacgagtctcttatttctactcttccaaacgatacaaagaagattcagaagtctatctgcaagattaacgctaaggctcttgatgtggtgactattaagtgcccacacactaagaacttcactccaaaggattacttcccaaactcttctcttattactaacgataagaaaattgtgattactttcgataagaagaacttcgttacttacattgatccaactaagaaaactttctctcttaaggatatttacattcagtctttctacggtgtgtctcttgatcaccttaaccagattaaaaagattcacgaggaatgggatgatgtgcaccttttctacccaccacacaacgttcttcacaacgtggtgcttaacaaccacattgtgaacctttcttcagctcttgagggtgttcttttcatgaagtctaaggtgacaggtgatgagactgctactaagaagaacactactcttcctactgatggtgtgtcatctattcttattccaccatacgtgaaagaggatattactttccaccttttctgcggaaagtctactactaagaagccaaacaagaagaacacatctcttgctcttattcacattcacatttcttctaacaggaacattattcacggttgcgatttcctttaccttgagaaccagactaacgatgctatttctaataacaacaacaactcttactctattttcactcacaacaagaacactgagaacaaccttatttgcgatatttctcttattccaaagactgtgattggtattaagtgtcctaacaagaagttgaacccacagacttgcttcgatgaggtgtactacgtgaagcaagaggatgtgccatctaagactattactgctgataagtacaacactttctctaaggataagattggaaacattcttaagaacgctattagtattaacaacccagatgagaaggataacacttacacttaccttattcttccagagaagttcgaggaagagcttattgatacaaagaaagtgcttgcttgcacttgcgataacaagtacattattcacatgaagattgagaagtcaactatggataagattaagattgatgagaagaaaactattggaaaggatatt

SEQ ID NO: 224 - protein, 611 aa, Plasmodium falciparum
QNGGSYPYKSGEYRTKSFFGYGYYEVRMKAAKNVGIVSSFFTYTGPSDNNPWDEIDIEFLGKDTTKVQFNWYKNGVGGNEYLHNLGFDASQDFHTYGFEWRPDYIDFYVDGKKVYRGTRNIPVTPGKIMMNLWPGIGVDEWLGRYDGRTPLQAEYEYVKYYPNGRSEFKLVVNTPFVAVFSNFDSSQWEKADWANGSVFNCVWKPSQVTFSNGKMILTLDREYVDEHICDYEKNESLISTLPNDTKKIQKSICKINAKALDVVTIKCPHTKNFTPKDYFPNSSLITNDKKIVITFDKKNFVTYIDPTKKTFSLKDIYIQSFYGVSLDHLNQIKKIHEEWDDVHLFYPPHNVLHNVVLNNHIVNLSSALEGVLFMKSKVTGDETATKKNTTLPTDGVSSILIPPYVKEDITFHLFCGKSTTKKPNKKNTSLALIHIHISSNRNIIHGCDFLYLENQTNDAISNNNNNSYSIFTHNKNTENNLICDISLIPKTVIGIKCPNKKLNPQTCFDEVYYVKQEDVPSKTITADKYNTFSKDKIGNILKNAISINNPDEKDNTYTYLILPEKFEEELIDTKKVLACTCDNKYIIHMKIEKSTMDKIKIDEKKTIGKDI

SEQ ID NO: 225 - DNA, 1563 bp, Plasmodium falciparum
ggaggttcttatccatataagtctggtgagtatagaactaagtctttctttggatatggttattatgaagttaggatgaaggctgcaaagaacgttggaattgtttcttctttctttacttatactggaccatctgataacaacccatgggatgagattgatattgagtttcttggaaaggatactactaaggttcaattcaactggtataagaatggtgttggtggaaacgagtatcttcataaccttggatttgatgcttctcaagattttcatacttatggttttgagtggagaccagattatattgatttttatgttgatggaaagaaggtttatagaggtactagaaacattccagttactcctggaaagattatgatgaatctttggccaggaattggtgttgatgaatggcttggtagatatgatggaagaactccacttcaagctgagtatgagtatgttaagtattatccaaacggtagatcttgcaagtacgatgtgactactaaggttgcaacttgcgagattattgatacaattgattcttctgtgcttaaagagcaccacactgttcactactctattactttgtctagatgggataagttgattattaagtacccaactaacgaaaagactcacttcgagaatttcttcgtgaacccattcaaccttaaggataaggtgttgtacaactacaacaagcctattaacattgagcacattcttccaggtgctattactactgatatttacgatacaaggactaagattaagcagtacattcttaggattccaccatacgtgcacaaggatattcacttctctcttgagttcaacaactctctttctcttactaagcagaaccagaacattatttacggaaacgtggctaagattttcattcacattaaccagggatacaaagagattcacggttgcgatttcactggaaagtactctcaccttttcacttactctaaaaagccacttccaaacgatgatgatatctgcaacgtgactattggaaacaacactttctctggattcgcttgcctttctcactttgagcttaagccaaacaactgcttctcttctgtgtacgattacaacgaggctaacaaggtgaagaagttgttcgatctttctactaaggtggagcttgatcacattaagcagaacacttcaggatacactttgtcttacattattttcaacaaagagtctactaagttgaagttctcttgcacttgttcttctaactactcaaactacactattaggattactttcgatccaaactacattattccagagccacagtctagggctattattaagtatgtggatcttcaagataagaacttcgctaagtaccttaggaagttgaagcttgttgttaatactccatttgttgctgttttctctaactttgattcttctcaatgggaaaaggctgattgggctaacggttctgtttttaactgtgtttggaagccatctcaagttactttttctaacggaaagatgattcttactttggatagagagtatgtc

SEQ ID NO: 226 - protein, 522 aa, Plasmodium falciparum
QNGGSYPYKSGEYRTKSFFGYGYYEVRMKAAKNVGIVSSFFTYTGPSDNNPWDEIDIEFLGKDTTKVQFNWYKNGVGGNEYLHNLGFDASQDFHTYGFEWRPDYIDFYVDGKKVYRGTRNIPVTPGKIMMNLWPGIGVDEWLGRYDGRTPLQAEYEYVKYYPNGRSCKYDVTTKVATCEIIDTIDSSVLKEHHTVHYSITLSRWDKLIIKYPTNEKTHFENFFVNPFNLKDKVLYNYNKPINIEHILPGAITTDIYDTRTKIKQYILRIPPYVHKDIHFSLEFNNSLSLTKQNQNIIYGNVAKIFIHINQGYKEIHGCDFTGKYSHLFTYSKKPLPNDDDICNVTIGNNTFSGFACLSHFELKPNNCFSSVYDYNEANKVKKLFDLSTKVELDHIKQNTSGYTLSYIIFNKESTKLKFSCTCSSNYSNYTIRITFDPNYIIPEPQSRAIIKYVDLQDKNFAKYLRKLKLVVNTPFVAVFSNFDSSQWEKADWANGSVFNCVWKPSQVTFSNGKMILTLDREY

SEQ ID NO: 227 - DNA, 1572 bp, Plasmodium falciparum
ggaggttcttatccatataagtctggtgagtatagaactaagtctttctttggatatggttattatgaagttaggatgaaggctgcaaagaacgttggaattgtttcttctttctttacttatactggaccatctgataacaacccatgggatgagattgatattgagtttcttggaaaggatactactaaggttcaattcaactggtataagaatggtgttggtggaaacgagtatcttcataaccttggatttgatgcttctcaagattttcatacttatggttttgagtggagaccagattatattgatttttatgttgatggaaagaaggtttatagaggtactagaaacattccagttactcctggaaagattatgatgaatctttggccaggaattggtgttgatgaatggcttggtagatatgatggaagaactccacttcaagctgagtatgagtatgttaagtattatccaaacggtagatctgaattcaagcttgttgttaatactccatttgttgctgttttctctaactttgattcttctcaatgggaaaaggctgattgggctaacggttctgtttttaactgtgtttggaagccatctcaagttactttttctaacggaaagatgattcttactttggatagagagtatgtcgactgcaagtacgatgtgactactaaggttgcaacttgcgagattattgatacaattgattcttctgtgcttaaagagcaccacactgttcactactctattactttgtctagatgggataagttgattattaagtacccaactaacgaaaagactcacttcgagaatttcttcgtgaacccattcaaccttaaggataaggtgttgtacaactacaacaagcctattaacattgagcacattcttccaggtgctattactactgatatttacgatacaaggactaagattaagcagtacattcttaggattccaccatacgtgcacaaggatattcacttctctcttgagttcaacaactctctttctcttactaagcagaaccagaacattatttacggaaacgtggctaagattttcattcacattaaccagggatacaaagagattcacggttgcgatttcactggaaagtactctcaccttttcacttactctaaaaagccacttccaaacgatgatgatatctgcaacgtgactattggaaacaacactttctctggattcgcttgcctttctcactttgagcttaagccaaacaactgcttctcttctgtgtacgattacaacgaggctaacaaggtgaagaagttgttcgatctttctactaaggtggagcttgatcacattaagcagaacacttcaggatacactttgtcttacattattttcaacaaagagtctactaagttgaagttctcttgcacttgttcttctaactactcaaactacactattaggattactttcgatccaaactacattattccagagccacagtctagggctattattaagtatgtggatcttcaagataagaacttcgctaagtaccttaggaagttg

SEQ ID NO: 228 - protein, 526 aa, Plasmodium falciparum
QNGGSYPYKSGEYRTKSFFGYGYYEVRMKAAKNVGIVSSFFTYTGPSDNNPWDEIDIEFLGKDTTKVQFNWYKNGVGGNEYLHNLGFDASQDFHTYGFEWRPDYIDFYVDGKKVYRGTRNIPVTPGKIMMNLWPGIGVDEWLGRYDGRTPLQAEYEYVKYYPNGRSEFKLVVNTPFVAVFSNFDSSQWEKADWANGSVFNCVWKPSQVTFSNGKMILTLDREYVDCKYDVTTKVATCEIIDTIDSSVLKEHHTVHYSITLSRWDKLIIKYPTNEKTHFENFFVNPFNLKDKVLYNYNKPINIEHILPGAITTDIYDTRTKIKQYILRIPPYVHKDIHFSLEFNNSLSLTKQNQNIIYGNVAKIFIHINQGYKEIHGCDFTGKYSHLFTYSKKPLPNDDDICNVTIGNNTFSGFACLSHFELKPNNCFSSVYDYNEANKVKKLFDLSTKVELDHIKQNTSGYTLSYIIFNKESTKLKFSCTCSSNYSNYTIRITFDPNYIIPEPQSRAIIKYVDLQDKNFAKYLRKL

SEQ ID NO: 229 - DNA, 2112 bp, Plasmodium falciparum
aacaacactaacaaagagtatgtttgcgatttcactgatcagcttaagccaactgagtctggaccaaaggttaagaagtgcgaggttaaggttaacgagccacttattaaggtgaagattatttgcccacttaagggatctgtggagaagttgtacgataacattgagtacgtgccaaagaagtctccatacgttgttcttacaaaagaagagactaagttgaaagagaagttgctttctaagttgatttacggacttcttatttctccaactgtgaacgagaaagagaacaacttcaaagagggtgttattgagttcactcttccaccagttgttcacaaggctactgtgttctacttcatttgcgataactctaagactgaggatgataacaagaagggaaacaggggtattgtggaggtttacgtggagccatacggaaacaagattaacggatgcgctttccttgatgaggatgaagaggaagagaagtacggaaaccagattgaagaggatgagcacaacgagaagattaagatgaaaactttcttcactcagaacatttacaagaagaacaacatttacccatgctacatgaagttgtactctggtgatattggaggaattcttttcccaaagaacattaagtctactacttgcttcgaagagatgattccatacaacaaagagattaagtggaacaaagagaacaagtctcttggaaacttggtgaacaactctgtggtgtataacaaagagatgaacgctaagtacttcaacgttcagtacgtgcacattccaacttcatacaaggatactcttaaccttttttgttctattattcttaaagaggaagagtctaaccttatttctacttcttaccttgtgtacgtttctattaacgaagagcttcaattctctcttttcgatttctacgagtctttcgtgcctattaagaaaactattcaggtggcacagaagaacgttaacaacaaagagcacgattacacttgcgatttcactgataagttggataagactgtgccatctactgctaacggaaagaagttgttcatctgtaggaagcaccttaaagagttcgatactttcactcttaagtgcaacgtgcaaaagactcagtacccaaacattgagattttcccaaagactcttaaggataagaaagaggtgttgaagttggatcttgatattcagtaccagatgttctctaagttcttcaagttcaacactcagaacgctaagtaccttaacctttacccttactaccttattttcccattcaaccacattggaaagaaagagcttaagaacaacccaacttacaagaaccacaaggatgtgaagtacttcgagcagagttctgtgctttctcctctttcttctgctgattctcttggaaagttgcttaacttccttgatactcaagagactgtgtgccttactgagaagattagataccttcaactttctattaacgagcttggatctgataacaacactttctctgtgactttccaggtgccaccttacattgatattaaggaaccattctacttcatgttcggatgcaacaacaacaagggagagggaaacattggaattgtggagcttttgatttctaagcaggaagagaagattaagggatgcaacttccacgagtctaagttggattacttcaacgagcagatttcttctgatactcacgagtgcactcttcatgcttacgagaacgatattattggattcaactgccttgagactactcatccaaacgaggttgaagttgaggttgaggatgctgagatttaccttcaaccagagaactgcttcaacaacgtgtacaagggacttaactctgtggatattactactattcttaagaacgctcagacttacaacattaacaacaagaaaactccaactttccttaagattccaccatacaaccttttggaggatgtggagatttcttgccagtgcactattaagcaggtggtgaaaaagatcaaagtgattattactaagaacgatactgtgcttcttaagagagaggttcagtctgagtctactcttgatgataagatttacaag

SEQ ID NO: 230 - protein, 704 aa, Plasmodium falciparum
NNTNKEYVCDFTDQLKPTESGPKVKKCEVKVNEPLIKVKIICPLKGSVEKLYDNIEYVPKKSPYVVLTKEETKLKEKLLSKLIYGLLISPTVNEKENNFKEGVIEFTLPPVVHKATVFYFICDNSKTEDDNKKGNRGIVEVYVEPYGNKINGCAFLDEDEEEEKYGNQIEEDEHNEKIKMKTFFTQNIYKKNNIYPCYMKLYSGDIGGILFPKNIKSTTCFEEMIPYNKEIKWNKENKSLGNLVNNSVVYNKEMNAKYFNVQYVHIPTSYKDTLNLFCSIILKEEESNLISTSYLVYVSINEELQFSLFDFYESFVPIKKTIQVAQKNVNNKEHDYTCDFTDKLDKTVPSTANGKKLFICRKHLKEFDTFTLKCNVQKTQYPNIEIFPKTLKDKKEVLKLDLDIQYQMFSKFFKFNTQNAKYLNLYPYYLIFPFNHIGKKELKNNPTYKNHKDVKYFEQSSVLSPLSSADSLGKLLNFLDTQETVCLTEKIRYLQLSINELGSDNNTFSVTFQVPPYIDIKEPFYFMFGCNNNKGEGNIGIVELLISKQEEKIKGCNFHESKLDYFNEQISSDTHECTLHAYENDIIGFNCLETTHPNEVEVEVEDAEIYLQPENCFNNVYKGLNSVDITTILKNAQTYNINNKKTPTFLKIPPYNLLEDVEISCQCTIKQVVKKIKVIITKNDTVLLKREVQSESTLDDKIYK

SEQ ID NO: 231 - DNA, 2772 bp, Plasmodium falciparum
ggaggttcttatccatataagtctggtgagtatagaactaagtctttctttggatatggttattatgaagttaggatgaaggctgcaaagaacgttggaattgtttcttctttctttacttatactggaccatctgataacaacccatgggatgagattgatattgagtttcttggaaaggatactactaaggttcaattcaactggtataagaatggtgttggtggaaacgagtatcttcataaccttggatttgatgcttctcaagattttcatacttatggttttgagtggagaccagattatattgatttttatgttgatggaaagaaggtttatagaggtactagaaacattccagttactcctggaaagattatgatgaatctttggccaggaattggtgttgatgaatggcttggtagatatgatggaagaactccacttcaagctgagtatgagtatgttaagtattatccaaacggtagatctaacaacactaacaaagagtatgtttgcgatttcactgatcagcttaagccaactgagtctggaccaaaggttaagaagtgcgaggttaaggttaacgagccacttattaaggtgaagattatttgcccacttaagggatctgtggagaagttgtacgataacattgagtacgtgccaaagaagtctccatacgttgttcttacaaaagaagagactaagttgaaagagaagttgctttctaagttgatttacggacttcttatttctccaactgtgaacgagaaagagaacaacttcaaagagggtgttattgagttcactcttccaccagttgttcacaaggctactgtgttctacttcatttgcgataactctaagactgaggatgataacaagaagggaaacaggggtattgtggaggtttacgtggagccatacggaaacaagattaacggatgcgctttccttgatgaggatgaagaggaagagaagtacggaaaccagattgaagaggatgagcacaacgagaagattaagatgaaaactttcttcactcagaacatttacaagaagaacaacatttacccatgctacatgaagttgtactctggtgatattggaggaattcttttcccaaagaacattaagtctactacttgcttcgaagagatgattccatacaacaaagagattaagtggaacaaagagaacaagtctcttggaaacttggtgaacaactctgtggtgtataacaaagagatgaacgctaagtacttcaacgttcagtacgtgcacattccaacttcatacaaggatactcttaaccttttttgttctattattcttaaagaggaagagtctaaccttatttctacttcttaccttgtgtacgtttctattaacgaagagcttcaattctctcttttcgatttctacgagtctttcgtgcctattaagaaaactattcaggtggcacagaagaacgttaacaacaaagagcacgattacacttgcgatttcactgataagttggataagactgtgccatctactgctaacggaaagaagttgttcatctgtaggaagcaccttaaagagttcgatactttcactcttaagtgcaacgtgcaaaagactcagtacccaaacattgagattttcccaaagactcttaaggataagaaagaggtgttgaagttggatcttgatattcagtaccagatgttctctaagttcttcaagttcaacactcagaacgctaagtaccttaacctttacccttactaccttattttcccattcaaccacattggaaagaaagagcttaagaacaacccaacttacaagaaccacaaggatgtgaagtacttcgagcagagttctgtgctttctcctctttcttctgctgattctcttggaaagttgcttaacttccttgatactcaagagactgtgtgccttactgagaagattagataccttcaactttctattaacgagcttggatctgataacaacactttctctgtgactttccaggtgccaccttacattgatattaaggaaccattctacttcatgttcggatgcaacaacaacaagggagagggaaacattggaattgtggagcttttgatttctaagcaggaagagaagattaagggatgcaacttccacgagtctaagttggattacttcaacgagcagatttcttctgatactcacgagtgcactcttcatgcttacgagaacgatattattggattcaactgccttgagactactcatccaaacgaggttgaagttgaggttgaggatgctgagatttaccttcaaccagagaactgcttcaacaacgtgtacaagggacttaactctgtggatattactactattcttaagaacgctcagacttacaacattaacaacaagaaaactccaactttccttaagattccaccatacaaccttttggaggatgtggagatttcttgccagtgcactattaagcaggtggtgaaaaagatcaaagtgattattactaagaacgatactgtgcttcttaagagagaggttcagtctgagtctactcttgatgataagatttacaagaagcttgttgttaatactccatttgttgctgttttctctaactttgattcttctcaatgggaaaaggctgattgggctaacggttctgtttttaactgtgtttggaagccatctcaagttactttttctaacggaaagatgattcttactttggatagagagtatgtc

SEQ ID NO: 232 - protein, 925 aa, Plasmodium falciparum
QNGGSYPYKSGEYRTKSFFGYGYYEVRMKAAKNVGIVSSFFTYTGPSDNNPWDEIDIEFLGKDTTKVQFNWYKNGVGGNEYLHNLGFDASQDFHTYGFEWRPDYIDFYVDGKKVYRGTRNIPVTPGKIMMNLWPGIGVDEWLGRYDGRTPLQAEYEYVKYYPNGRSNNTNKEYVCDFTDQLKPTESGPKVKKCEVKVNEPLIKVKIICPLKGSVEKLYDNIEYVPKKSPYVVLTKEETKLKEKLLSKLIYGLLISPTVNEKENNFKEGVIEFTLPPVVHKATVFYFICDNSKTEDDNKKGNRGIVEVYVEPYGNKINGCAFLDEDEEEEKYGNQIEEDEHNEKIKMKTFFTQNIYKKNNIYPCYMKLYSGDIGGILFPKNIKSTTCFEEMIPYNKEIKWNKENKSLGNLVNNSVVYNKEMNAKYFNVQYVHIPTSYKDTLNLFCSIILKEEESNLISTSYLVYVSINEELQFSLFDFYESFVPIKKTIQVAQKNVNNKEHDYTCDFTDKLDKTVPSTANGKKLFICRKHLKEFDTFTLKCNVQKTQYPNIEIFPKTLKDKKEVLKLDLDIQYQMFSKFFKFNTQNAKYLNLYPYYLIFPFNHIGKKELKNNPTYKNHKDVKYFEQSSVLSPLSSADSLGKLLNFLDTQETVCLTEKIRYLQLSINELGSDNNTFSVTFQVPPYIDIKEPFYFMFGCNNNKGEGNIGIVELLISKQEEKIKGCNFHESKLDYFNEQISSDTHECTLHAYENDIIGFNCLETTHPNEVEVEVEDAEIYLQPENCFNNVYKGLNSVDITTILKNAQTYNINNKKTPTFLKIPPYNLLEDVEISCQCTIKQVVKKIKVIITKNDTVLLKREVQSESTLDDKIYKKLVVNTPFVAVFSNFDSSQWEKADWANGSVFNCVWKPSQVTFSNGKMILTLDREY

SEQ ID NO: 233 - DNA, 2067 bp, Plasmodium falciparum
tacgttgatgagaaagaaaggcagggagagatatacccattcggagatgaagaggagaaagatgaaggtggagagtctttcacttacgagaagtctgaagtggacaaaacagatttgttcaagttcattgagggtggagagggtgatgatgtgtacaaagtggatggatctaaggtgttgcttgatgatgatacaatttctagggtgtcaaagaagcacactgctagggacggtgaatatggtgagtacggtgaagctgttgaggatggtgaaaacgtgattaagattattaggtctgtgcttcagtctggtgctttgccatctgttggagtggatgagcttgataagattgatttgtcttacgagactactgagtctggtgatactgctgtgtctgaggattcttacgataagtacgcttctaacaacactaacaaagagtatgtttgcgatttcactgatcagcttaagccaactgagtctggaccaaaggttaagaagtgcgaggttaaggttaacgagccacttattaaggtgaagattatttgcccacttaagggatctgtggagaagttgtacgataacattgagtacgtgccaaagaagtctccatacgttgttcttacaaaagaagagactaagttgaaagagaagttgctttctaagttgatttacggacttcttatttctccaactgtgaacgagaaagagaacaacttcaaagagggtgttattgagttcactcttccaccagttgttcacaaggctactgtgttctacttcatttgcgataactctaagactgaggatgataacaagaagggaaacaggggtattgtggaggtttacgtggagccatacggaaacaagattaacggatgcgctttccttgatgaggatgaagaggaagagaagtacggaaaccagattgaagaggatgagcacaacgagaagattaagatgaaaactttcttcactcagaacatttacaagaagaacaacatttacccatgctacatgaagttgtactctggtgatattggaggaattcttttcccaaagaacattaagtctactacttgcttcgaagagatgattccatacaacaaagagattaagtggaacaaagagaacaagtctcttggaaacttggtgaacaactctgtggtgtataacaaagagatgaacgctaagtacttcaacgttcagtacgtgcacattccaacttcatacaaggatactcttaaccttttttgttctattattcttaaagaggaagagtctaaccttatttctacttcttaccttgtgtacgtttctattaacgaagagcttcaattctctcttttcgatttctacgagtctttcgtgcctattaagaaaactattcaggtggcacagaagaacgttaacaacaaagagcacgattacacttgcgatttcactgataagttggataagactgtgccatctactgctaacggaaagaagttgttcatctgtaggaagcaccttaaagagttcgatactttcactcttaagtgcaacgtgcaaaagactcagtacccaaacattgagattttcccaaagactcttaaggataagaaagaggtgttgaagttggatcttgatattcagtaccagatgttctctaagttcttcaagttcaacactcagaacgctaagtaccttaacctttacccttactaccttattttcccattcaaccacattggaaagaaagagcttaagaacaacccaacttacaagaaccacaaggatgtgaagtacttcgagcagagttctgtgctttctcctctttcttctgctgattctcttggaaagttgcttaacttccttgatactcaagagactgtgtgccttactgagaagattagataccttcaactttctattaacgagcttggatctgataacaacactttctctgtgactttccaggtgccaccttacattgatattaaggaaccattctacttcatgttcggatgcaacaacaacaagggagagggaaacattggaattgtggagcttttgatttctaag

SEQ ID NO: 234 - protein, 689 aa, Plasmodium falciparum
YVDEKERQGEIYPFGDEEEKDEGGESFTYEKSEVDKTDLFKFIEGGEGDDVYKVDGSKVLLDDDTISRVSKKHTARDGEYGEYGEAVEDGENVIKIIRSVLQSGALPSVGVDELDKIDLSYETTESGDTAVSEDSYDKYASNNTNKEYVCDFTDQLKPTESGPKVKKCEVKVNEPLIKVKIICPLKGSVEKLYDNIEYVPKKSPYVVLTKEETKLKEKLLSKLIYGLLISPTVNEKENNFKEGVIEFTLPPVVHKATVFYFICDNSKTEDDNKKGNRGIVEVYVEPYGNKINGCAFLDEDEEEEKYGNQIEEDEHNEKIKMKTFFTQNIYKKNNIYPCYMKLYSGDIGGILFPKNIKSTTCFEEMIPYNKEIKWNKENKSLGNLVNNSVVYNKEMNAKYFNVQYVHIPTSYKDTLNLFCSIILKEEESNLISTSYLVYVSINEELQFSLFDFYESFVPIKKTIQVAQKNVNNKEHDYTCDFTDKLDKTVPSTANGKKLFICRKHLKEFDTFTLKCNVQKTQYPNIEIFPKTLKDKKEVLKLDLDIQYQMFSKFFKFNTQNAKYLNLYPYYLIFPFNHIGKKELKNNPTYKNHKDVKYFEQSSVLSPLSSADSLGKLLNFLDTQETVCLTEKIRYLQLSINELGSDNNTFSVTFQVPPYIDIKEPFYFMFGCNNNKGEGNIGIVELLISK

SEQ ID NO: 235 - DNA, 1329 bp, Plasmodium falciparum
tacgttgatgagaaagaaaggcagggagagatatacccattcggagatgaagaggagaaagatgaaggtggagagtctttcacttacgagaagtctgaagtggacaaaacagatttgttcaagttcattgagggtggagagggtgatgatgtgtacaaagtggatggatctaaggtgttgcttgatgatgatacaatttctagggtgtcaaagaagcacactgctagggacggtgaatatggtgagtacggtgaagctgttgaggatggtgaaaacgtgattaagattattaggtctgtgcttcagtctggtgctttgccatctgttggagtggatgagcttgataagattgatttgtcttacgagactactgagtctggtgatactgctgtgtctgaggattcttacgataagtacgcttctaacaacactaacaaagagtatgtttgcgatttcactgatcagcttaagccaactgagtctggaccaaaggttaagaagtgcgaggttaaggttaacgagccacttattaaggtgaagattatttgcccacttaagggatctgtggagaagttgtacgataacattgagtacgtgccaaagaagtctccatacgttgttcttacaaaagaagagactaagttgaaagagaagttgctttctaagttgatttacggacttcttatttctccaactgtgaacgagaaagagaacaacttcaaagagggtgttattgagttcactcttccaccagttgttcacaaggctactgtgttctacttcatttgcgataactctaagactgaggatgataacaagaagggaaacaggggtattgtggaggtttacgtggagccatacggaaacaagattaacggatgcgctttccttgatgaggatgaagaggaagagaagtacggaaaccagattgaagaggatgagcacaacgagaagattaagatgaaaactttcttcactcagaacatttacaagaagaacaacatttacccatgctacatgaagttgtactctggtgatattggaggaattcttttcccaaagaacattaagtctactacttgcttcgaagagatgattccatacaacaaagagattaagtggaacaaagagaacaagtctcttggaaacttggtgaacaactctgtggtgtataacaaagagatgaacgctaagtacttcaacgttcagtacgtgcacattccaacttcatacaaggatactcttaaccttttttgttctattattcttaaagaggaagagtctaaccttatttctacttcttaccttgtgtacgtttctattaacgaa

SEQ ID NO: 236 - protein, 443 aa, Plasmodium falciparum
YVDEKERQGEIYPFGDEEEKDEGGESFTYEKSEVDKTDLFKFIEGGEGDDVYKVDGSKVLLDDDTISRVSKKHTARDGEYGEYGEAVEDGENVIKIIRSVLQSGALPSVGVDELDKIDLSYETTESGDTAVSEDSYDKYASNNTNKEYVCDFTDQLKPTESGPKVKKCEVKVNEPLIKVKIICPLKGSVEKLYDNIEYVPKKSPYVVLTKEETKLKEKLLSKLIYGLLISPTVNEKENNFKEGVIEFTLPPVVHKATVFYFICDNSKTEDDNKKGNRGIVEVYVEPYGNKINGCAFLDEDEEEEKYGNQIEEDEHNEKIKMKTFFTQNIYKKNNIYPCYMKLYSGDIGGILFPKNIKSTTCFEEMIPYNKEIKWNKENKSLGNLVNNSVVYNKEMNAKYFNVQYVHIPTSYKDTLNLFCSIILKEEESNLISTSYLVYVSINE

SEQ ID NO: 237 - DNA, 861 bp, Plasmodium falciparum
tacgttgatgagaaagaaaggcagggagagatatacccattcggagatgaagaggagaaagatgaaggtggagagtctttcacttacgagaagtctgaagtggacaaaacagatttgttcaagttcattgagggtggagagggtgatgatgtgtacaaagtggatggatctaaggtgttgcttgatgatgatacaatttctagggtgtcaaagaagcacactgctagggacggtgaatatggtgagtacggtgaagctgttgaggatggtgaaaacgtgattaagattattaggtctgtgcttcagtctggtgctttgccatctgttggagtggatgagcttgataagattgatttgtcttacgagactactgagtctggtgatactgctgtgtctgaggattcttacgataagtacgcttctaacaacactaacaaagagtatgtttgcgatttcactgatcagcttaagccaactgagtctggaccaaaggttaagaagtgcgaggttaaggttaacgagccacttattaaggtgaagattatttgcccacttaagggatctgtggagaagttgtacgataacattgagtacgtgccaaagaagtctccatacgttgttcttacaaaagaagagactaagttgaaagagaagttgctttctaagttgatttacggacttcttatttctccaactgtgaacgagaaagagaacaacttcaaagagggtgttattgagttcactcttccaccagttgttcacaaggctactgtgttctacttcatttgcgataactctaagactgaggatgataacaagaagggaaacaggggtattgtggaggtttacgtggagccatac

SEQ ID NO: 238 - protein, 287 aa, Plasmodium falciparum
YVDEKERQGEIYPFGDEEEKDEGGESFTYEKSEVDKTDLFKFIEGGEGDDVYKVDGSKVLLDDDTISRVSKKHTARDGEYGEYGEAVEDGENVIKIIRSVLQSGALPSVGVDELDKIDLSYETTESGDTAVSEDSYDKYASNNTNKEYVCDFTDQLKPTESGPKVKKCEVKVNEPLIKVKIICPLKGSVEKLYDNIEYVPKKSPYVVLTKEETKLKEKLLSKLIYGLLISPTVNEKENNFKEGVIEFTLPPVVHKATVFYFICDNSKTEDDNKKGNRGIVEVYVEPY

SEQ ID NO: 239 - DNA, 438 bp, Plasmodium falciparum
aacaacactaacaaagagtatgtttgcgatttcactgatcagcttaagccaactgagtctggaccaaaggttaagaagtgcgaggttaaggttaacgagccacttattaaggtgaagattatttgcccacttaagggatctgtggagaagttgtacgataacattgagtacgtgccaaagaagtctccatacgttgttcttacaaaagaagagactaagttgaaagagaagttgctttctaagttgatttacggacttcttatttctccaactgtgaacgagaaagagaacaacttcaaagagggtgttattgagttcactcttccaccagttgttcacaaggctactgtgttctacttcatttgcgataactctaagactgaggatgataacaagaagggaaacaggggtattgtggaggtttacgtggagccatac

SEQ ID NO: 240 - protein, 146 aa, Plasmodium falciparum
NNTNKEYVCDFTDQLKPTESGPKVKKCEVKVNEPLIKVKIICPLKGSVEKLYDNIEYVPKKSPYVVLTKEETKLKEKLLSKLIYGLLISPTVNEKENNFKEGVIEFTLPPVVHKATVFYFICDNSKTEDDNKKGNRGIVEVYVEPY

SEQ ID NO: 241 - DNA, 1098 bp, Plasmodium falciparum
ggaggttcttatccatataagtctggtgagtatagaactaagtctttctttggatatggttattatgaagttaggatgaaggctgcaaagaacgttggaattgtttcttctttctttacttatactggaccatctgataacaacccatgggatgagattgatattgagtttcttggaaaggatactactaaggttcaattcaactggtataagaatggtgttggtggaaacgagtatcttcataaccttggatttgatgcttctcaagattttcatacttatggttttgagtggagaccagattatattgatttttatgttgatggaaagaaggtttatagaggtactagaaacattccagttactcctggaaagattatgatgaatctttggccaggaattggtgttgatgaatggcttggtagatatgatggaagaactccacttcaagctgagtatgagtatgttaagtattatccaaacggtagatctaacaacactaacaaagagtatgtttgcgatttcactgatcagcttaagccaactgagtctggaccaaaggttaagaagtgcgaggttaaggttaacgagccacttattaaggtgaagattatttgcccacttaagggatctgtggagaagttgtacgataacattgagtacgtgccaaagaagtctccatacgttgttcttacaaaagaagagactaagttgaaagagaagttgctttctaagttgatttacggacttcttatttctccaactgtgaacgagaaagagaacaacttcaaagagggtgttattgagttcactcttccaccagttgttcacaaggctactgtgttctacttcatttgcgataactctaagactgaggatgataacaagaagggaaacaggggtattgtggaggtttacgtggagccatacaagcttgttgttaatactccatttgttgctgttttctctaactttgattcttctcaatgggaaaaggctgattgggctaacggttctgtttttaactgtgtttggaagccatctcaagttactttttctaacggaaagatgattcttactttggatagagagtatgtc

SEQ ID NO: 242 - protein, 367 aa, Plasmodium falciparum
QNGGSYPYKSGEYRTKSFFGYGYYEVRMKAAKNVGIVSSFFTYTGPSDNNPWDEIDIEFLGKDTTKVQFNWYKNGVGGNEYLHNLGFDASQDFHTYGFEWRPDYIDFYVDGKKVYRGTRNIPVTPGKIMMNLWPGIGVDEWLGRYDGRTPLQAEYEYVKYYPNGRSNNTNKEYVCDFTDQLKPTESGPKVKKCEVKVNEPLIKVKIICPLKGSVEKLYDNIEYVPKKSPYVVLTKEETKLKEKLLSKLIYGLLISPTVNEKENNFKEGVIEFTLPPVVHKATVFYFICDNSKTEDDNKKGNRGIVEVYVEPYKLVVNTPFVAVFSNFDSSQWEKADWANGSVFNCVWKPSQVTFSNGKMILTLDREY

SEQ ID NO: 243 - DNA, 1107 bp, Plasmodium falciparum
ggaggttcttatccatataagtctggtgagtatagaactaagtctttctttggatatggttattatgaagttaggatgaaggctgcaaagaacgttggaattgtttcttctttctttacttatactggaccatctgataacaacccatgggatgagattgatattgagtttcttggaaaggatactactaaggttcaattcaactggtataagaatggtgttggtggaaacgagtatcttcataaccttggatttgatgcttctcaagattttcatacttatggttttgagtggagaccagattatattgatttttatgttgatggaaagaaggtttatagaggtactagaaacattccagttactcctggaaagattatgatgaatctttggccaggaattggtgttgatgaatggcttggtagatatgatggaagaactccacttcaagctgagtatgagtatgttaagtattatccaaacggtagatctgaattcaagcttgttgttaatactccatttgttgctgttttctctaactttgattcttctcaatgggaaaaggctgattgggctaacggttctgtttttaactgtgtttggaagccatctcaagttactttttctaacggaaagatgattcttactttggatagagagtatgtcgacaacaacactaacaaagagtatgtttgcgatttcactgatcagcttaagccaactgagtctggaccaaaggttaagaagtgcgaggttaaggttaacgagccacttattaaggtgaagattatttgcccacttaagggatctgtggagaagttgtacgataacattgagtacgtgccaaagaagtctccatacgttgttcttacaaaagaagagactaagttgaaagagaagttgctttctaagttgatttacggacttcttatttctccaactgtgaacgagaaagagaacaacttcaaagagggtgttattgagttcactcttccaccagttgttcacaaggctactgtgttctacttcatttgcgataactctaagactgaggatgataacaagaagggaaacaggggtattgtggaggtttacgtggagccatac

SEQ ID NO: 244 - protein, 371 aa, Plasmodium falciparum
QNGGSYPYKSGEYRTKSFFGYGYYEVRMKAAKNVGIVSSFFTYTGPSDNNPWDEIDIEFLGKDTTKVQFNWYKNGVGGNEYLHNLGFDASQDFHTYGFEWRPDYIDFYVDGKKVYRGTRNIPVTPGKIMMNLWPGIGVDEWLGRYDGRTPLQAEYEYVKYYPNGRSEFKLVVNTPFVAVFSNFDSSQWEKADWANGSVFNCVWKPSQVTFSNGKMILTLDREYVDNNTNKEYVCDFTDQLKPTESGPKVKKCEVKVNEPLIKVKIICPLKGSVEKLYDNIEYVPKKSPYVVLTKEETKLKEKLLSKLIYGLLISPTVNEKENNFKEGVIEFTLPPVVHKATVFYFICDNSKTEDDNKKGNRGIVEVYVEPY

SEQ ID NO: 245 - DNA, 1752 bp, Plasmodium falciparum
ggatccttaattaaaggaggttcttatccatataagtctggtgagtatagaactaagtctttctttggatatggttattatgaagttaggatgaaggctgcaaagaacgttggaattgtttcttctttctttacttatactggaccatctgataacaacccatgggatgagattgatattgagtttcttggaaaggatactactaaggttcaattcaactggtataagaatggtgttggtggaaacgagtatcttcataaccttggatttgatgcttctcaagattttcatacttatggttttgagtggagaccagattatattgatttttatgttgatggaaagaaggtttatagaggtactagaaacattccagttactcctggaaagattatgatgaatctttggccaggaattggtgttgatgaatggcttggtagatatgatggaagaactccacttcaagctgagtatgagtatgttaagtattatccaaacggtagatctaaggtgacagttgatactgtgtgcaagaggggtttccttattcagatgtctggacaccttgagtgtaagtgcgagaacgatcttgttcttgtgaacgaagagacttgcgaagagaaggtgttgaagtgcgatgagaaaactgtgaacaagccatgcggagatttctctaagtgcattaagattgatggaaacccagtgtcttatgcttgcaagtgcaaccttggatacgatatggtgaacaatgtgtgcattccaaacgagtgcaagcaagtgacttgcggaaacggaaagtgcattcttgatacttctaacccagttaagactgctgtgtgtagttgcaacattggaaaggtgccaaacgttcaggatcagaacaagtgctctaaggatggtgaaactaagtgctctcttaagtgccttaaagagaacgagacttgcaaggctgtggatggtatttacaagtgcgattgcaaggatggattcattattgatcaagagtcatctatctgcactaagcttgttgttaatactccatttgttgctgttttctctaactttgattcttctcaatgggaaaaggctgattgggctaacggttctgtttttaactgtgtttggaagccatctcaagttactttttctaacggaaagatgattcttactttggatagagagtatgtcgacaaggtgacagttgatactgtgtgcaagaggggtttccttattcagatgtctggacaccttgagtgtaagtgcgagaacgatcttgttcttgtgaacgaagagacttgcgaagagaaggtgttgaagtgcgatgagaaaactgtgaacaagccatgcggagatttctctaagtgcattaagattgatggaaacccagtgtcttatgcttgcaagtgcaaccttggatacgatatggtgaacaatgtgtgcattccaaacgagtgcaagcaagtgacttgcggaaacggaaagtgcattcttgatacttctaacccagttaagactgctgtgtgtagttgcaacattggaaaggtgccaaacgttcaggatcagaacaagtgctctaaggatggtgaaactaagtgctctcttaagtgccttaaagagaacgagacttgcaaggctgtggatggtatttacaagtgcgattgcaaggatggattcattattgatcaagagtcatctatctgcactgtcgaccatcatcatcatcatcataaggatgaactttgactcgagctc

SEQ ID NO: 246 - protein, 565 aa, Plasmodium falciparum
QNGGSYPYKSGEYRTKSFFGYGYYEVRMKAAKNVGIVSSFFTYTGPSDNNPWDEIDIEFLGKDTTKVQFNWYKNGVGGNEYLHNLGFDASQDFHTYGFEWRPDYIDFYVDGKKVYRGTRNIPVTPGKIMMNLWPGIGVDEWLGRYDGRTPLQAEYEYVKYYPNGRSKVTVDTVCKRGFLIQMSGHLECKCENDLVLVNEETCEEKVLKCDEKTVNKPCGDFSKCIKIDGNPVSYACKCNLGYDMVNNVCIPNECKQVTCGNGKCILDTSNPVKTAVCSCNIGKVPNVQDQNKCSKDGETKCSLKCLKENETCKAVDGIYKCDCKDGFIIDQESSICTKLVVNTPFVAVFSNFDSSQWEKADWANGSVFNCVWKPSQVTFSNGKMILTLDREYVDKVTVDTVCKRGFLIQMSGHLECKCENDLVLVNEETCEEKVLKCDEKTVNKPCGDFSKCIKIDGNPVSYACKCNLGYDMVNNVCIPNECKQVTCGNGKCILDTSNPVKTAVCSCNIGKVPNVQDQNKCSKDGETKCSLKCLKENETCKAVDGIYKCDCKDGFIIDQESSICT

SEQ ID NO: 247 - DNA, 1719 bp, Plasmodium falciparum
ggatccttaattaaaggaggttcttatccatataagtctggtgagtatagaactaagtctttctttggatatggttattatgaagttaggatgaaggctgcaaagaacgttggaattgtttcttctttctttacttatactggaccatctgataacaacccatgggatgagattgatattgagtttcttggaaaggatactactaaggttcaattcaactggtataagaatggtgttggtggaaacgagtatcttcataaccttggatttgatgcttctcaagattttcatacttatggttttgagtggagaccagattatattgatttttatgttgatggaaagaaggtttatagaggtactagaaacattccagttactcctggaaagattatgatgaatctttggccaggaattggtgttgatgaatggcttggtagatatgatggaagaactccacttcaagctgagtatgagtatgttaagtattatccaaacggtagatctaaggtgacagttgatactgtgtgcaagaggggtttccttattcagatgtctggacaccttgagtgtaagtgcgagaacgatcttgttcttgtgaacgaagagacttgcgaagagaaggtgttgaagtgcgatgagaaaactgtgaacaagccatgcggagatttctctaagtgcattaagattgatggaaacccagtgtcttatgcttgcaagtgcaaccttggatacgatatggtgaacaatgtgtgcattccaaacgagtgcaagcaagtgacttgcggaaacggaaagtgcattcttgatacttctaacccagttaagactgctgtgtgtagttgcaacattggaaaggtgccaaacgttcaggatcagaacaagtgctctaaggatggtgaaactaagtgctctcttaagtgccttaaagagaacgagacttgcaaggctgtggatggtatttacaagtgcgattgcaaggatggattcattattgatcaagagtcatctatctgcactaagcttgttgttaatactccatttgttgctgttttctctaactttgattcttctcaatgggaaaaggctgattgggctaacggttctgtttttaactgtgtttggaagccatctcaagttactttttctaacggaaagatgattcttactttggatagagagtatgtcgacaaggtgacagttgatactgtgtgcaagaggggtttccttattcagatgtctggacaccttgagtgtaagtgcgagaacgatcttgttcttgtgaacgaagagacttgcgaagagaaggtgttgaagtgcgatgagaaaactgtgaacaagccatgcggagatttctctaagtgcattaagattgatggaaacccagtgtcttatgcttgcaagtgcaaccttggatacgatatggtgaacaatgtgtgcattccaaacgagtgcaagcaagtgacttgcggaaacggaaagtgcattcttgatacttctaacccagttaagactgctgtgtgtagttgcaacattggaaaggtgccaaacgttcaggatcagaacaagtgctctaaggatggtgaaactaagtgctctcttaagtgccttaaagagaacgagacttgcaaggctgtggatggtatttacaagtgcgattgcaaggatggattcattattgatcaagagtcatctatctgcactgtcgacctcgagctc

SEQ ID NO: 248 - protein, 565 aa, Plasmodium falciparum; identical to SEQ ID NO: 246

SEQ ID NO: 249 - DNA, 1728 bp, Plasmodium falciparum
ggatccttaattaaaggaggttcttatccatataagtctggtgagtatagaactaagtctttctttggatatggttattatgaagttaggatgaaggctgcaaagaacgttggaattgtttcttctttctttacttatactggaccatctgataacaacccatgggatgagattgatattgagtttcttggaaaggatactactaaggttcaattcaactggtataagaatggtgttggtggaaacgagtatcttcataaccttggatttgatgcttctcaagattttcatacttatggttttgagtggagaccagattatattgatttttatgttgatggaaagaaggtttatagaggtactagaaacattccagttactcctggaaagattatgatgaatctttggccaggaattggtgttgatgaatggcttggtagatatgatggaagaactccacttcaagctgagtatgagtatgttaagtattatccaaacggtagatctagagttactgagaacactatctgcaagtacggataccttattcagatgtctaaccactacgagtgcaagtgtattgagggatacgtgcttattaacgaggatacttgcggaaagaaagttgtgtgcgataaggtggagaactctttcaaggcttgcgatgagtacgcttactgcttcgatcttggaaacaagaacaacgagaagcagattaagtgcatgtgcaggactgagtacactcttactgctggtgtttgcgttccaaatgtgtgcagggataaagtttgcggaaagggaaagtgcattgtggacccagctaactctcttactcacacttgctcttgcaacattggaactattcttaaccagaacaagttgtgcgatattcagggtgatactccatgctctcttaagtgcgctgagaacgaagtgtgtactcttgagggaaactactacacttgcaaagaagatccatcttctaacggtggaggaaacactgttgatcaggctgatacttcttactctgtgaagcttgttgttaatactccatttgttgctgttttctctaactttgattcttctcaatgggaaaaggctgattgggctaacggttctgtttttaactgtgtttggaagccatctcaagttactttttctaacggaaagatgattcttactttggatagagagtatgtcgacaaggtgacagttgatactgtgtgcaagaggggtttccttattcagatgtctggacaccttgagtgtaagtgcgagaacgatcttgttcttgtgaacgaagagacttgcgaagagaaggtgttgaagtgcgatgagaaaactgtgaacaagccatgcggagatttctctaagtgcattaagattgatggaaacccagtgtcttatgcttgcaagtgcaaccttggatacgatatggtgaacaatgtgtgcattccaaacgagtgcaagcaagtgacttgcggaaacggaaagtgcattcttgatacttctaacccagttaagactgctgtgtgtagttgcaacattggaaaggtgccaaacgttcaggatcagaacaagtgctctaaggatggtgaaactaagtgctctcttaagtgccttaaagagaacgagacttgcaaggctgtggatggtatttacaagtgcgattgcaaggatggattcattattgatcaagagtcatctatctgcactgtcctcgagctc

SEQ ID NO: 250 - protein, 569 aa, Plasmodium falciparum
QNGGSYPYKSGEYRTKSFFGYGYYEVRMKAAKNVGIVSSFFTYTGPSDNNPWDEIDIEFLGKDTTKVQFNWYKNGVGGNEYLHNLGFDASQDFHTYGFEWRPDYIDFYVDGKKVYRGTRNIPVTPGKIMMNLWPGIGVDEWLGRYDGRTPLQAEYEYVKYYPNGRSRVTENTICKYGYLIQMSNHYECKCIEGYVLINEDTCGKKVVCDKVENSFKACDEYAYCFDLGNKNNEKQIKCMCRTEYTLTAGVCVPNVCRDKVCGKGKCIVDPANSLTHTCSCNIGTILNQNKLCDIQGDTPCSLKCAENEVCTLEGNYYTCKEDPSSNGGGNTVDQADTSYSVKLVVNTPFVAVFSNFDSSQWEKADWANGSVFNCVWKPSQVTFSNGKMILTLDREYVDKVTVDTVCKRGFLIQMSGHLECKCENDLVLVNEETCEEKVLKCDEKTVNKPCGDFSKCIKIDGNPVSYACKCNLGYDMVNNVCIPNECKQVTCGNGKCILDTSNPVKTAVCSCNIGKVPNVQDQNKCSKDGETKCSLKCLKENETCKAVDGIYKCDCKDGFIIDQESSICT

SEQ ID NO: 251 - DNA, 1731 bp, Plasmodium falciparum
ggatccttaattaaaggaggttcttatccatataagtctggtgagtatagaactaagtctttctttggatatggttattatgaagttaggatgaaggctgcaaagaacgttggaattgtttcttctttctttacttatactggaccatctgataacaacccatgggatgagattgatattgagtttcttggaaaggatactactaaggttcaattcaactggtataagaatggtgttggtggaaacgagtatcttcataaccttggatttgatgcttctcaagattttcatacttatggttttgagtggagaccagattatattgatttttatgttgatggaaagaaggtttatagaggtactagaaacattccagttactcctggaaagattatgatgaatctttggccaggaattggtgttgatgaatggcttggtagatatgatggaagaactccacttcaagctgagtatgagtatgttaagtattatccaaacggtagatctagagttactgagaacactatctgcaagtacggataccttattcagatgtctaaccactacgagtgcaagtgtattgagggatacgtgcttattaacgaggatacttgcggaaagaaagttgtgtgcgataaggtggagaactctttcaaggcttgcgatgagtacgcttactgcttcgatcttggaaacaagaacaacgagaagcagattaagtgcatgtgcaggactgagtacactcttactgctggtgtttgcgttccaaatgtgtgcagggataaagtttgcggaaagggaaagtgcattgtggacccagctaactctcttactcacacttgctcttgcaacattggaactattcttaaccagaacaagttgtgcgatattcagggtgatactccatgctctcttaagtgcgctgagaacgaagtgtgtactcttgagggaaactactacacttgcaaagaagatccatcttctaacggtggaggaaacactgttgatcaggctgatacttcttactctgtgaagcttgttgttaatactccatttgttgctgttttctctaactttgattcttctcaatgggaaaaggctgattgggctaacggttctgtttttaactgtgtttggaagccatctcaagttactttttctaacggaaagatgattcttactttggatagagagtatgtcgacaaggtgacagttgatactgtgtgcaagaggggtttccttattcagatgtctggacaccttgagtgtaagtgcgagaacgatcttgttcttgtgaacgaagagacttgcgaagagaaggtgttgaagtgcgatgagaaaactgtgaacaagccatgcggagatttctctaagtgcattaagattgatggaaacccagtgtcttatgcttgcaagtgcaaccttggatacgatatggtgaacaatgtgtgcattccaaacgagtgcaagcaagtgacttgcggaaacggaaagtgcattcttgatacttctaacccagttaagactgctgtgtgtagttgcaacattggaaaggtgccaaacgttcaggatcagaacaagtgctctaaggatggtgaaactaagtgctctcttaagtgccttaaagagaacgagacttgcaaggctgtggatggtatttacaagtgcgattgcaaggatggattcattattgatcaagagtcatctatctgcactgtcgacctcgagctc

SEQ ID NO: 252 - protein, 569 aa, Plasmodium falciparum; identical to SEQ ID NO: 250

SEQ ID NO: 253 - DNA, 1743 bp, Plasmodium falciparum
ggatccttaattaaaggaggttcttatccatataagtctggtgagtatagaactaagtctttctttggatatggttattatgaagttaggatgaaggctgcaaagaacgttggaattgtttcttctttctttacttatactggaccatctgataacaacccatgggatgagattgatattgagtttcttggaaaggatactactaaggttcaattcaactggtataagaatggtgttggtggaaacgagtatcttcataaccttggatttgatgcttctcaagattttcatacttatggttttgagtggagaccagattatattgatttttatgttgatggaaagaaggtttatagaggtactagaaacattccagttactcctggaaagattatgatgaatctttggccaggaattggtgttgatgaatggcttggtagatatgatggaagaactccacttcaagctgagtatgagtatgttaagtattatccaaacggtagatctagagttactgagaacactatctgcaagtacggataccttattcagatgtctaaccactacgagtgcaagtgtattgagggatacgtgcttattaacgaggatacttgcggaaagaaagttgtgtgcgataaggtggagaactctttcaaggcttgcgatgagtacgcttactgcttcgatcttggaaacaagaacaacgagaagcagattaagtgcatgtgcaggactgagtacactcttactgctggtgtttgcgttccaaatgtgtgcagggataaagtttgcggaaagggaaagtgcattgtggacccagctaactctcttactcacacttgctcttgcaacattggaactattcttaaccagaacaagttgtgcgatattcagggtgatactccatgctctcttaagtgcgctgagaacgaagtgtgtactcttgagggaaactactacacttgcaaagaagatccatcttctaacggtggaggaaacactgttgatcaggctgatacttcttactctgtgaagcttgttgttaatactccatttgttgctgttttctctaactttgattcttctcaatgggaaaaggctgattgggctaacggttctgtttttaactgtgtttggaagccatctcaagttactttttctaacggaaagatgattcttactttggatagagagtatgtcgacagagttactgagaacactatctgcaagtacggataccttattcagatgtctaaccactacgagtgcaagtgtattgagggatacgtgcttattaacgaggatacttgcggaaagaaagttgtgtgcgataaggtggagaactctttcaaggcttgcgatgagtacgcttactgcttcgatcttggaaacaagaacaacgagaagcagattaagtgcatgtgcaggactgagtacactcttactgctggtgtttgcgttccaaatgtgtgcagggataaagtttgcggaaagggaaagtgcattgtggacccagctaactctcttactcacacttgctcttgcaacattggaactattcttaaccagaacaagttgtgcgatattcagggtgatactccatgctctcttaagtgcgctgagaacgaagtgtgtactcttgagggaaactactacacttgcaaagaagatccatcttctaacggtggaggaaacactgttgatcaggctgatacttcttactctgtggtcgacctcgagctc

SEQ ID NO: 254 - protein, 573 aa, Plasmodium falciparum
QNGGSYPYKSGEYRTKSFFGYGYYEVRMKAAKNVGIVSSFFTYTGPSDNNPWDEIDIEFLGKDTTKVQFNWYKNGVGGNEYLHNLGFDASQDFHTYGFEWRPDYIDFYVDGKKVYRGTRNIPVTPGKIMMNLWPGIGVDEWLGRYDGRTPLQAEYEYVKYYPNGRSRVTENTICKYGYLIQMSNHYECKCIEGYVLINEDTCGKKVVCDKVENSFKACDEYAYCFDLGNKNNEKQIKCMCRTEYTLTAGVCVPNVCRDKVCGKGKCIVDPANSLTHTCSCNIGTILNQNKLCDIQGDTPCSLKCAENEVCTLEGNYYTCKEDPSSNGGGNTVDQADTSYSVKLVVNTPFVAVFSNFDSSQWEKADWANGSVFNCVWKPSQVTFSNGKMILTLDREYVDRVTENTICKYGYLIQMSNHYECKCIEGYVLINEDTCGKKVVCDKVENSFKACDEYAYCFDLGNKNNEKQIKCMCRTEYTLTAGVCVPNVCRDKVCGKGKCIVDPANSLTHTCSCNIGTILNQNKLCDIQGDTPCSLKCAENEVCTLEGNYYTCKEDPSSNGGGNTVDQADTSYSV

SEQ ID NO: 255 - protein, 6 aa, Artificial Sequence
  source: /note="Description of Artificial Sequence: Synthetic 6xHis tag"
HHHHHH

SEQ ID NO: 256 - protein, 4 aa, Artificial Sequence
  source: /note="Description of Artificial Sequence: Synthetic peptide"
KDEL

SEQ ID NO: 257 - DNA, 1392 bp, Artificial Sequence
  source: /note="Description of Artificial Sequence: Synthetic polynucleotide"
atgggatttgttctcttttcacaattgccttcatttcttcttgtctctacacttctcttattcctagtaatatcccactcttgccgtgcccaaaatggaggttcttatccatataagtctggtgagtatagaactaagtctttctttggatatggttattatgaagttaggatgaaggctgcaaagaacgttggaattgtttcttctttctttacttatactggaccatctgataacaacccatgggatgagattgatattgagtttcttggaaaggatactactaaggttcaattcaactggtataagaatggtgttggtggaaacgagtatcttcataaccttggatttgatgcttctcaagattttcatacttatggttttgagtggagaccagattatattgatttttatgttgatggaaagaaggtttatagaggtactagaaacattccagttactcctggaaagattatgatgaatctttggccaggaattggtgttgatgaatggcttggtagatatgatggaagaactccacttcaagctgagtatgagtatgttaagtattatccaaacggtagatctaacaacgatttctgcaagccatcttctcttaactctgagatttctggattcattggatacaagtgcaacttctctaacgagggtgttcacaaccttaagccagatatgagagagagaagatcaattttctgcactattcactcttacttcatttacgataagattaggcttattattccaaagaagtcatcttctccagagttcaagattcttccagagaagtgcttccagaaggtgtacactgattacgagaacagggtggagactgatatttctgagcttggacttattgagtacgagattgaagagaacgatacaaacccaaactacaacgagaggactattactatttctccattctctccaaaggatattgagttcttctgcttctgcgataacactgagaaagtgatttcttctattgagggaagatcagctatggttcatgtgagggtgttgaagtacccacacaacattcttttcactaaccttactaacgatcttttcacttacttgccaaagacttacaacgagtctaacttcgtgtctaacgtgcttgaggtggagcttaatgatggtgagttgttcgtgcttgcttgcaagcttgttgttaatactccatttgttgctgttttctctaactttgattcttctcaatgggaaaaggctgattgggctaacggttctgtttttaactgtgtttggaagccatctcaagttactttttctaacggaaagatgattcttactttggatagagagtatgtcgaccatcatcatcatcatcataaggatgaactttga

SEQ ID NO: 258 - protein, 463 aa, Artificial Sequence; identical to SEQ ID NO: 75
  source: /note="Description of Artificial Sequence: Synthetic polypeptide"

SEQ ID NO: 259 - DNA, 1404 bp, Artificial Sequence
  source: /note="Description of Artificial Sequence: Synthetic polynucleotide"
atgggatttgttctcttttcacaattgccttcatttcttcttgtctctacacttctcttattcctagtaatatcccactcttgccgtgcccaaaatggaggttcttatccatataagtctggtgagtatagaactaagtctttctttggatatggttattatgaagttaggatgaaggctgcaaagaacgttggaattgtttcttctttctttacttatactggaccatctgataacaacccatgggatgagattgatattgagtttcttggaaaggatactactaaggttcaattcaactggtataagaatggtgttggtggaaacgagtatcttcataaccttggatttgatgcttctcaagattttcatacttatggttttgagtggagaccagattatattgatttttatgttgatggaaagaaggtttatagaggtactagaaacattccagttactcctggaaagattatgatgaatctttggccaggaattggtgttgatgaatggcttggtagatatgatggaagaactccacttcaagctgagtatgagtatgttaagtattatccaaacggtagatctgaattcaagcttgttgttaatactccatttgttgctgttttctctaactttgattcttctcaatgggaaaaggctgattgggctaacggttctgtttttaactgtgtttggaagccatctcaagttactttttctaacggaaagatgattcttactttggatagagagtatgtcgacaacaacgatttctgcaagccatcttctcttaactctgagatttctggattcattggatacaagtgcaacttctctaacgagggtgttcacaaccttaagccagatatgagagagagaagatcaattttctgcactattcactcttacttcatttacgataagattaggcttattattccaaagaagtcatcttctccagagttcaagattcttccagagaagtgcttccagaaggtgtacactgattacgagaacagggtggagactgatatttctgagcttggacttattgagtacgagattgaagagaacgatacaaacccaaactacaacgagaggactattactatttctccattctctccaaaggatattgagttcttctgcttctgcgataacactgagaaagtgatttcttctattgagggaagatcagctatggttcatgtgagggtgttgaagtacccacacaacattcttttcactaaccttactaacgatcttttcacttacttgccaaagacttacaacgagtctaacttcgtgtctaacgtgcttgaggtggagcttaatgatggtgagttgttcgtgcttgcttgcgtcgaccatcatcatcatcatcataaggatgaactttga

SEQ ID NO: 260 - protein, 467 aa, Artificial Sequence
  source: /note="Description of Artificial Sequence: Synthetic polypeptide"
MGFVLFSQLPSFLLVSTLLLFLVISHSCRAQNGGSYPYKSGEYRTKSFFGYGYYEVRMKAAKNVGIVSSFFTYTGPSDNNPWDEIDIEFLGKDTTKVQFNWYKNGVGGNEYLHNLGFDASQDFHTYGFEWRPDYIDFYVDGKKVYRGTRNIPVTPGKIMMNLWPGIGVDEWLGRYDGRTPLQAEYEYVKYYPNGRSEFKLVVNTPFVAVFSNFDSSQWEKADWANGSVFNCVWKPSQVTFSNGKMILTLDREYVDNNDFCKPSSLNSEISGFIGYKCNFSNEGVHNLKPDMRERRSIFCTIHSYFIYDKIRLIIPKKSSSPEFKILPEKCFQKVYTDYENRVETDISELGLIEYEIEENDTNPNYNERTITISPFSPKDIEFFCFCDNTEKVISSIEGRSAMVHVRVLKYPHNILFTNLTNDLFTYLPKTYNESNFVSNVLEVELNDGELFVLACVDHHHHHHKDEL

SEQ ID NO: 261 - DNA, 1230 bp, Artificial Sequence
  source: /note="Description of Artificial Sequence: Synthetic polynucleotide"
atgggatttgttctcttttcacaattgccttcatttcttcttgtctctacacttctcttattcctagtaatatcccactcttgccgtgcccaaaatggaggttcttatccatataagtctggtgagtatagaactaagtctttctttggatatggttattatgaagttaggatgaaggctgcaaagaacgttggaattgtttcttctttctttacttatactggaccatctgataacaacccatgggatgagattgatattgagtttcttggaaaggatactactaaggttcaattcaactggtataagaatggtgttggtggaaacgagtatcttcataaccttggatttgatgcttctcaagattttcatacttatggttttgagtggagaccagattatattgatttttatgttgatggaaagaaggtttatagaggtactagaaacattccagttactcctggaaagattatgatgaatctttggccaggaattggtgttgatgaatggcttggtagatatgatggaagaactccacttcaagctgagtatgagtatgttaagtattatccaaacggtagatctaacaacgatttctgcaagccatcttctcttaactctgagatttctggattcattggatacaagtgcaacttctctaacgagggtgttcacaaccttaagccagatatgagagagagaagatcaattttctgcactattcactcttacttcatttacgataagattaggcttattattccaaagaagtcatcttctccagagttcaagattcttccagagaagtgcttccagaaggtgtacactgattacgagaacagggtggagactgatatttctgagcttggacttattgagtacgagattgaagagcaagatacaaacccaaactacaacgagaggactattactatttctccattctctccaaaggatattgagttcttctgcttctgcgataacactgagaaagtgatttcttctattgagggaagatcagctaagcttgttgttaatactccatttgttgctgttttctctaactttgattcttctcaatgggaaaaggctgattgggctaacggttctgtttttaactgtgtttggaagccatctcaagttactttttctaacggaaagatgattcttactttggatagagagtatgtcgaccatcatcatcatcatcataaggatgaactttga

SEQ ID NO: 262 - protein, 409 aa, Artificial Sequence
  source: /note="Description of Artificial Sequence: Synthetic polypeptide"
MGFVLFSQLPSFLLVSTLLLFLVISHSCRAQNGGSYPYKSGEYRTKSFFGYGYYEVRMKAAKNVGIVSSFFTYTGPSDNNPWDEIDIEFLGKDTTKVQFNWYKNGVGGNEYLHNLGFDASQDFHTYGFEWRPDYIDFYVDGKKVYRGTRNIPVTPGKIMMNLWPGIGVDEWLGRYDGRTPLQAEYEYVKYYPNGRSNNDFCKPSSLNSEISGFIGYKCNFSNEGVHNLKPDMRERRSIFCTIHSYFIYDKIRLIIPKKSSSPEFKILPEKCFQKVYTDYENRVETDISELGLIEYEIEEQDTNPNYNERTITISPFSPKDIEFFCFCDNTEKVISSIEGRSAKLVVNTPFVAVFSNFDSSQWEKADWANGSVFNCVWKPSQVTFSNGKMILTLDREYVDHHHHHHKDEL

SEQ ID NO: 263 - DNA, 1779 bp, Artificial Sequence
  source: /note="Description of Artificial Sequence: Synthetic polynucleotide"
atgggatttgttctcttttcacaattgccttcatttcttcttgtctctacacttctcttattcctagtaatatcccactcttgccgtgcccaaaatggaggttcttatccatataagtctggtgagtatagaactaagtctttctttggatatggttattatgaagttaggatgaaggctgcaaagaacgttggaattgtttcttctttctttacttatactggaccatctgataacaacccatgggatgagattgatattgagtttcttggaaaggatactactaaggttcaattcaactggtataagaatggtgttggtggaaacgagtatcttcataaccttggatttgatgcttctcaagattttcatacttatggttttgagtggagaccagattatattgatttttatgttgatggaaagaaggtttatagaggtactagaaacattccagttactcctggaaagattatgatgaatctttggccaggaattggtgttgatgaatggcttggtagatatgatggaagaactccacttcaagctgagtatgagtatgttaagtattatccaaacggtagatctaacaacactaacaaagagtatgtttgcgatttcactgatcagcttaagccaactgagtctggaccaaaggttaagaagtgcgaggttaaggttaacgagccacttattaaggtgaagattatttgcccacttaagggatctgtggagaagttgtacgataacattgagtacgtgccaaagaagtctccatacgttgttcttacaaaagaagagactaagttgaaagagaagttgctttctaagttgatttacggacttcttatttctccaactgtgaacgagaaagagaacaacttcaaagagggtgttattgagttcactcttccaccagttgttcacaaggctactgtgttctacttcatttgcgataactctaagactgaggatgataacaagaagggaaacaggggtattgtggaggtttacgtggagccatacggaaacaagattaacggatgcgctttccttgatgaggatgaagaggaagagaagtacggaaaccagattgaagaggatgagcacaacgagaagattaagatgaaaactttcttcactcagaacatttacaagaagaacaacatttacccatgctacatgaagttgtactctggtgatattggaggaattcttttcccaaagaacattaagtctactacttgcttcgaagagatgattccatacaacaaagagattaagtggaacaaagagaacaagtctcttggaaacttggtgaacaactctgtggtgtataacaaagagatgaacgctaagtacttcaacgttcagtacgtgcacattccaacttcatacaaggatactcttaaccttttttgttctattattcttaaagaggaagagtctaaccttatttctacttcttaccttgtgtacgtttctattaacgaagagcttcaattctctcttttcgatttctacgagtctttcgtgcctattaagaaaactattcaggtggcacagaagaacgttaagcttgttgttaatactccatttgttgctgttttctctaactttgattcttctcaatgggaaaaggctgattgggctaacggttctgtttttaactgtgtttggaagccatctcaagttactttttctaacggaaagatgattcttactttggatagagagtatgtcgaccatcatcatcatcatcataaggatgaactttga

SEQ ID NO: 264 - DNA, 1986 bp, Artificial Sequence; identical to SEQ ID NO: 111
  source: /note="Description of Artificial Sequence: Synthetic polynucleotide"

SEQ ID NO: 265 - protein, 661 aa, Artificial Sequence; identical to SEQ ID NO: 112
  source: /note="Description of Artificial Sequence: Synthetic polypeptide"
